(19) United States
(12) Patent Application Publication
(10) Pub. No.: US 2009/0215641 A1
(43) Pub. Date: Aug. 27, 2009

(54) Gene involved in occurrence/recurrence of hcv-positive hepatocelluar carcinoma

(75) Inventors: Mariko Esumi, Tokyo (JP); Tadatoshi Takayama, Tokyo (JP); Keiko Takagi, Tokyo (JP); Hideyo Yasuda, Kanagawa (JP)

Correspondence Address: BIRCH STEWART KOLASCH & BIRCH, PO BOX 747, FALLS CHURCH, VA, 22040-0747, US

(73) Assignee: Nihon University, Tokyo (JP)

(21) Appl. No.: 11/989,838

(22) PCT Filed: Aug. 11, 2006
(86) PCT No.: PCT/JP2006/316204

§ 371 Date: Aug. 8, 2008

(30) Foreign Application Priority Data
Aug. 12, 2005 (JP) 2005-234915

(51) Int. Cl. C40B 30/04; C40B 40/08

(52) U.S. Cl. 506/9; 506/17

(57) ABSTRACT

The present invention relates to a method for screening a gene involved in early recurrence of HCV-positive hepatocellular carcinoma associated with chronic hepatitis, comprising: determining an expression level of a gene in a noncancerous site from each of early and late recurrent cases of HCV-positive hepatocellular carcinoma associated with chronic hepatitis; and selecting a gene whose expression is increased in the early recurrent case compared with that in the late recurrent case. The present invention can provide a gene involved in recurrence of hepatocellular carcinoma.

### FIELD OF THE INVENTION

[0001] The present invention relates to a gene involved in occurrence/recurrence of HCV-positive hepatocellular carcinoma.

### BACKGROUND OF THE INVENTION

[0002] Eighty percent of the hepatocellular carcinoma in Japanese patients are estimated to develop from chronic hepatitis C or from subsequent liver cirrhosis (Kiyosawa K, Umemura T, Ichijo T, Matsumoto A, Yoshizawa K, Gad A, Tanaka E. Hepatocelullar carcinoma: recent trends in Japan. Gastroenterology 2004; 127: S17-26). Cancer occurs in 20 to 30 years after infection with hepatitis C virus (HCV) but the mechanism thereof still has unclear points. Although resection of hepatocellular carcinoma has been established as an approach to treat hepatocellular carcinoma, the rate of recurrence within two years following the surgery is as high as 50% and thus its prognosis is known to be extremely poor (Makuuchi M, Takayama T, Kubota K, Kimura W, Midorikawa Y, Miyagawa S, Kawasaki S. Hepatic resection for hepatocellular carcinoma—Japanese experience. Hepatogastroenterology 1998; 45:S1267-1274). Although recurrence of hepatocellular carcinoma in the remaining liver appears to have the same mechanism as primary hepatocellular carcinoma, prognosis factors therein are not yet clear at molecular level (Poon R T, Fan S T, Ng I O, Lo C M, Liu C L, Wong J. Different risk factors and prognosis for early and late intrahepatic recurrence after resection of hepatocellular carcinoma. Cancer 2000; 89: 500-507).

### DISCLOSURE OF THE INVENTION

[0003] The object of the present invention is to provide a method for screening a gene involved in occurrence/recurrence of HCV-positive hepatocellular carcinoma, and a microarray for testing recurrence of HCV-positive hepatocellular carcinoma comprising said gene.

[0004] In order to solve the above-mentioned problem, the present inventors have gone through the following studies.

[0005] For the purpose of understanding factors that determine the risk of recurrence of hepatocellular carcinoma at molecular level, the present inventors searched for the presence of difference in gene expressions at molecular level in the remaining hepatic tissues between cases that are prone to and not prone to post-resection recurrence among early hepatocellular carcinoma cases. In general, similar search for risk of recurrence is carried out using a cancerous site of the resected hepatic tissue (Iizuka N, Oka M, Yamada-Okabe H, Nishida M, Maeda Y, Mori N, Takao T, et al. Oligonucleotide microarray for prediction of early intrahepatic recurrence of hepatocellular carcinoma after curative resection. Lancet 2003; 361:923-929.). The present inventors, however, focused on the recurrence risk information in the remaining hepatic tissue, and examined as described above using a noncancerous site of the resected hepatic tissue that seemed to have similar recurrence risk information as the remaining hepatic tissue. Specifically, the present inventors comprehensively searched for gene expressions characteristics of the difference in risk of recurrence in the noncancerous site tissue rather than in the resected cancer tissue.

[0006] In addition, the present inventors collected late recurrent cases and early recurrent cases from hepatocellular carcinoma recurrent cases to compare the gene expression patterns in both groups. Approaches of the past studies have been comparison between early recurrent cases (for example, recurrence within a year) and other cases (for example, recurrence after more than a year and within three years). On the other hand, the present inventors conducted a long-term patient follow-up and succeeded in identifying genes that express specific to late recurrent cases by using cases without recurrence for 3 years or longer (as long as 7 years or longer) as the late recurrent cases.

[0007] Furthermore, the present inventors have examined the risk of recurrence by the presence and absence of liver cirrhosis in tissues from noncancerous sites. Chronic inflammation causes fibrosis of the hepatic tissue, which results in a higher rate of liver cirrhosis. Most cases of hepatocellular carcinoma type C are said to be associated with liver cirrhosis. Observation of early hepatocellular carcinoma cases, however, showed that in nearly about half of the cases cancer actually occurred from hepatic tissues that had not yet developed liver cirrhosis. Accordingly, the present inventors considered that information of risk of cancer occurrence are different between liver cirrhosis and liver lesion, i.e., the late and previous stages of chronic hepatitis, respectively, and thus the risk of recurrence was separately analyzed in the presence and the absence of liver cirrhosis in order to avoid analysis results to be biased by this information.

[0008] The present inventors have gone through keen examination from the standpoint described above, thereby completing the present invention. Thus, the present invention is as follows:

[0009] (1) A method for screening a gene involved in early recurrence of HCV-positive hepatocellular carcinoma associated with chronic hepatitis, comprising:

[0010] determining an expression level of a gene in a noncancerous site from each of early and late recurrent cases of HCV-positive hepatocellular carcinoma associated with chronic hepatitis; and selecting a gene whose expression is increased in the early recurrent case compared with that in the late recurrent case.

[0011] (2) A method for screening a gene involved in late recurrence of HCV-positive hepatocellular carcinoma associated with chronic hepatitis, comprising:

[0012] determining an expression level of a gene in a noncancerous site from each of early and late recurrent cases of HCV-positive hepatocellular carcinoma associated with chronic hepatitis; and selecting a gene whose expression is increased in the late recurrent case compared with that in the early recurrent case.

[0013] (3) A method for screening a gene involved in early recurrence of HCV-positive hepatocellular carcinoma associated with liver cirrhosis, comprising:

[0014] determining an expression level of a gene in a noncancerous site from each of early and late recurrent cases of HCV-positive hepatocellular carcinoma associated with liver cirrhosis; and selecting a gene whose expression is increased in the early recurrent case compared with that in the late recurrent case.

[0015] (4) A method for screening a gene involved in late recurrence of HCV-positive hepatocellular carcinoma associated with liver cirrhosis, comprising:

[0016] determining an expression level of a gene in a noncancerous site from each of early and late recurrent cases of HCV-positive hepatocellular carcinoma associated with liver cirrhosis; and selecting a gene whose expression is increased in the late recurrent case compared with that in the early recurrent case.

[0017] (5) A microarray used for examining recurrence of HCV-positive hepatocellular carcinoma associated with chronic hepatitis, the microarray arranged with a probe for one or more genes selected from the group consisting of genes containing a nucleotide sequence represented by any of SEQ ID NOS: 1-115.

[0018] (6) A microarray used for examining recurrence of HCV-positive hepatocellular carcinoma associated with liver cirrhosis, the microarray arranged with a probe for one or more genes selected from the group consisting of genes containing a nucleotide sequence represented by any of SEQ ID NO: 1-115.

[0019] The present invention provides a method for screening a cancer recurrence-related gene involved in HCV-positive hepatocellular carcinoma associated with liver cirrhosis or HCV-positive hepatocellular carcinoma without liver cirrhosis. Since the screening method of the present invention selects a gene by classifying the hepatocellular carcinoma cases according to the onset mechanism of the hepatocellular carcinoma, cancer recurrence-related genes can be screened more accurately.

[0020] Furthermore, the present invention also provides a microarray arranged with the cancer recurrence-related genes. The microarray of the present invention may be used to predict the time of recurrence of hepatocellular carcinoma. Preferably, the microarray of the present invention may be used to predict the time of recurrence of hepatocellular carcinoma classified by the presence and the absence of liver cirrhosis according to the onset mechanism of hepatocellular carcinoma. The gene expression patterns in noncancerous sites collected from hepatocellular carcinoma can be analyzed with the microarray of the present invention to estimate whether the recurrence of hepatocellular carcinoma is early or late.

### BRIEF DESCRIPTION OF THE DRAWINGS

[0021] FIG. 1 shows an approach for classifying into an early recurrent group and a late recurrent group upon two-group comparison.

[0022] FIG. 2 shows a procedure for selecting a recurrence-related gene (a) from a chronic hepatitis tissue.

[0023] FIG. 3 shows a procedure for selecting a recurrence-related gene from a liver cirrhosis tissue.

[0024] FIG. 4 shows a procedure for selecting a recurrence-related gene (b) from a chronic hepatitis tissue.

[0025] FIG. 5 shows an analysis of overlaps among the selected recurrence-related genes.

[0026] FIG. 6 shows cluster classification of cases caused by the recurrence-related genes derived from chronic hepatitis.

[0027] FIG. 7 shows cluster classification of cases caused by the recurrence-related genes derived from liver cirrhosis.

[0028] FIG. 8 is a schematic view showing the positions of the probes for the recurrence-related genes.

[0029] FIG. 9 shows the results of examination of the recurrence-related genes by real-time PCR.

[0030] FIG. 10 shows an approach for classifying into an early recurrent group and a late recurrent group upon two-group comparison.

[0031] FIGS. 11A and B show distributions of the expression levels of the endogenous control gene candidates. Relative expression levels were obtained assuming the median of 26 exemplary expression levels as 1. The vertical axis represents natural logarithm of the relative expression levels.

[0032] FIG. 12 shows typical expression patterns of genes that had difference in the expression levels between the early recurrent group (recurrence within 2 years) and the late recurrent group (without recurrence for 3 years or longer).

### BEST MODES FOR CARRYING OUT THE INVENTION

[0033] Hereinafter, embodiments of the present invention will be described. The following embodiments are exemplification for describing the present invention, and they are not intended to limit the present invention.

[0034] Documents, laid-open patent applications, patent publications and other patent documents cited herein are incorporated herein by reference. In addition, the entire disclosure of Japanese Patent Application No. 2005-234915 filed on Aug. 12, 2005 to which the present application claims priority is incorporated herein by reference.

### 1. General Outline

[0035] The present invention relates to a method for screening a gene involved in occurrence/recurrence of HCV-positive hepatocellular carcinoma, and a microarray arranged with a probe for this gene.

[0036] The screening method of the present invention has the following three major features.

[0037] Firstly, the characteristics of gene expressions resulting from the difference in the risk of recurrence are searched comprehensively in a noncancerous site tissue rather than in a resected cancer tissue as in a conventional method. A gene expression in a resected noncancerous site tissue can be considered the same as the gene expression in the remaining liver site. If a gene expression pattern in a resected cancer tissue is related to the risk of recurrence, this recurrence is limited to the same cancer as the resected cancer, i.e., limited to the case of metastasis. Considering the multicentric cancer occurrence mechanism of hepatocellular carcinoma, the possibility of recurrence being metastatic is very low in an early stage of hepatocellular carcinoma cases. Since the gene expression patterns in the remaining liver sites of hepatocellular carcinoma cases at stages I and II appear to be more related to the risk of recurrence than the gene expression patterns in resected cancer tissues, the present invention can analyze a gene involved in recurrence more accurately by using a noncancerous site tissue.

[0038] Secondly, late and early recurrent cases are extracted from hepatocellular carcinoma cases to compare the gene expression patterns between both cases. According to the present invention, genes related to the risk of recurrence can be analyzed according to the difference of the time of recurrence. Moreover, analysis based on such comparison is useful to understand not only the mechanism of recurrence but also the mechanism of occurrence of hepatocellular carcinoma from primary chronic hepatitis.

[0039] Thirdly, the risk of recurrence is analyzed while distinguishing noncancerous sites of hepatocellular carcinoma type C cases by the presence and the absence of liver cirrhosis. This is the most distinguishing feature of the present invention. Since occurrence of cancer from liver cirrhosis and occurrence of cancer from hepatitis seem to have different cancer occurrence mechanisms, the risk of recurrence is examined separately for liver cirrhosis and hepatitis cases and thus genes characteristic of each of these cases can be found.

[0040] The noncancerous sites are 100% chronic hepatitis. They include sites that show liver cirrhosis with high degree of fibrosis caused by progressed inflammation. Fibrosis is ranked from F0 to F4, where F4 corresponds to liver cirrhosis. F3 or lower rankings are called chronic hepatitis, but to be more accurate, they are all chronic hepatitis which are distinguished among those that have not become liver cirrhosis (F0-F3) and that have become liver cirrhosis (F4).

### 2. Selection and Classification of Cases

[0041] According to the method of the present invention, gene expressions are analyzed in noncancerous sites of hepatitis C virus (HCV)-positive hepatocellular carcinoma (also referred to as “hepatocellular carcinoma type C”) to screen a gene involved in recurrence of hepatocellular carcinoma type C. Specifically, the method of the present invention is aimed at hepatocellular carcinoma type C cases.

[0042] According to the present invention, hepatocellular carcinoma type C cases are classified into cases associated with and cases without liver cirrhosis (LC).

[0043] Herein, “hepatocellular carcinoma type C associated with liver cirrhosis” refers to hepatocellular carcinoma type C that appears to have developed from liver cirrhosis. Furthermore, a noncancerous site of hepatocellular carcinoma type C associated with liver cirrhosis case may be referred to as a “liver cirrhosis case”. Herein, “hepatocellular carcinoma type C associated with chronic hepatitis” refers to hepatocellular carcinoma type C associated with chronic hepatitis (CH) rather than liver cirrhosis, and refers to HCV-positive hepatocellular carcinoma that appears to have developed from chronic hepatitis. In addition, a noncancerous site of a hepatocellular carcinoma type C case associated with chronic hepatitis (CH) rather than liver cirrhosis may be referred to as “chronic hepatitis case”.

[0044] Whether the case is a liver cirrhosis case or a chronic hepatitis case can be determined by observation upon resection of hepatocellular carcinoma type C. Since fibrosis is highly progressed in the liver with liver cirrhosis, onset of liver cirrhosis can readily be confirmed by those skilled in the art.

[0045] In addition, according to the present invention, hepatocellular carcinoma type C cases are classified according to difficulty of recurrence. Specifically, hepatocellular carcinoma type C cases are classified into an early recurrent case group (also referred to as “Early”) and a late recurrent case group (also referred to as “Late”) according to the time of recurrence of hepatocellular carcinoma type C.

[0046] According to the present invention, “recurrence” of hepatocellular carcinoma can be determined according to clinical criteria that a neoplastic lesion is present in the remaining liver, and that the lesion is found by all of the three observations: 1) a mosaic pattern on ultrasound, 2) a low-high-low density profile on dynamic CT, and 3) tumor staining on angiography.

[0047] Hepatocellular carcinoma type C can be classified into the early recurrent case group and the late recurrent case group according to any selected number of months without recurrence. For example, a period between the surgery and recurrence of the early recurrent case group can be selected to be less than 36 months, preferably within 15 months, more preferably within 14 months, more preferably within 13 months and most preferably within 12 months. Furthermore, for example, a period between the surgery and recurrence of the late recurrent case group can be selected to be 36 months (3 years) or longer, preferably 37 months or longer, more preferably 40 months or longer, more preferably 42 months or longer, most preferably 65 months or longer. Exemplary classifications of hepatocellular carcinoma type C cases are shown in Table 1 and FIG. 1.

TABLE 1
37 Hepatocellular Carcinoma Type C Cases

| | | | | | Months | | |
|---|---|---|---|---|---|---|---|
| | | | | | without | | |
| | | | | | recur- | | |
| No. | Sex | Age | CH/LC^{a} | Stage^{b} | rence^{c} | Microarray^{d} | (CHb) |
| 59 | M | 66 | CH | I | >94 | Late | Late |
| 4 | M | 65 | CH | I | 75 | Late | Late |
| 25 | M | 51 | CH | I | 70 | Late | Late |
| 6 | M | 65 | CH | II | 65 | Late | Late |
| 18 | M | 68 | LC | I | 58 | Late | |
| 122 | F | 68 | LC | II | >54 | Late | |
| 12 | M | 66 | CH | II | 41 | Late | Early |
| 16 | M | 70 | CH | I | >37 | Late | Early |
| 48 | F | 65 | LC | I | 37 | Late | |
| 31 | M | 60 | LC | I | 37 | Late | |
| 80 | M | 73 | CH | II | 34 | | |
| 22 | M | 65 | CH | I | 33 | | |
| 3 | F | 71 | LC | I | 29 | | |
| 65 | M | 60 | LC | I | 28 | | |
| 30 | F | 62 | LC | II | 26 | | |
| 10 | M | 56 | LC | I | 25 | | |
| 70 | M | 57 | LC | II | 24 | | |
| 79 | M | 73 | LC | I | 22 | | |
| 73 | M | 50 | CH | II | 20 | | |
| 81 | F | 69 | LC | I | 17 | | |
| 26 | M | 70 | LC | I | 16 | | |
| 72 | M | 71 | LC | II | 16 | | |
| 69 | M | 66 | LC | II | 15 | | |
| 14 | M | 62 | CH | II | 14 | Early | Early |
| 78 | F | 66 | CH | I | 13 | Early | Early |
| 82 | M | 71 | CH | I | 13 | Early | Early |
| 17 | M | 54 | LC | I | 12 | Early | |
| 71 | M | 57 | LC | II | 12 | | |
| 77 | F | 65 | LC | I | 10 | Early | |
| 62 | M | 66 | LC | I | 9 | Early | |
| 74 | M | 67 | CH | II | 9 | Early | Early |
| 15 | F | 68 | LC | II | 8 | Early | |
| 103 | F | 61 | LC | I | 7 | Early | |
| 75 | M | 65 | CH | II | 6 | | |
| 101 | M | 73 | LC | II | 6 | | |
| 106 | M | 78 | LC | II | 6 | | |
| 44 | M | 58 | CH | I | 4 | Early | Early |

^{a}CH: chronic hepatitis, LC: liver cirrhosis
^{b}Staging of hepatocellular carcinoma was conducted according to TNM staging. Stage II was limited to solitary cases in order to avoid presence of cancer in the noncancerous site.
^{c}“Months without recurrence” include cases where recurrence cannot be found upon investigation as well as the number of months before recurrence.
^{d}Cases used for microarray analysis are shown separately between late recurrent group (Late) and early recurrent group (Early). CHb shows the results from different classification into the two groups (late and early groups) for 11 chronic hepatitis cases.

[0048] FIG. 1 shows an approach for classifying into an early recurrent group and a late recurrent group for two-group comparison. ♦ represents the early recurrent group, shaded ∘ represent cases selected as the late recurrent groups. Δ represents cases that were selected as neither group. Shaded ∘ represents late recurrent cases with number of months without recurrence that has been confirmed. The horizontal axis represents the numbers of cases in the early group: late group. The numbers of cases in the boxes represent classifications used for the microarrays in Examples 2-4.

[0049] According to the present invention, the order of the step of classifying hepatocellular carcinoma type C cases between the chronic hepatitis case and the liver cirrhosis case, and the step of classifying into the early recurrent case group and the late recurrent case group is not particularly limited and either step may come before the other or both steps may be conducted simultaneously.

### 3. Determination of Gene Expression Level

[0050] (1) Noncancerous Site

[0051] For each cases classified as described above, the expression level of the gene in the noncancerous site is determined. The noncancerous site may be a part of liver collected upon resection of hepatocellular carcinoma type C or a part of liver collected by biopsy or the like as long as it is a noncancerous site obtained from the patient. According to the present invention, the noncancerous site tissue used may be one that has been frozen and stored after collection with liquid nitrogen or in a freezer. In order to prevent the cancer to be mixed with the noncancerous site and in order to remove recurrence case caused by metastasis, the cases are preferably solitary cases. Whether the collected tissue is a noncancerous site or a cancerous site can be readily determined by those skilled in the art by inspection with the naked eye, microscopic observation of a hematoxylin-eosin stained sample or the like.

[0052] (2) Gene Expression Level

[0053] According to the screening method of the present invention, an expression level of a gene in a noncancerous site can be determined using an mRNA amount or a protein amount as an index, but in order to determine expression levels of various types of genes, it is favorable to use an mRNA amount as an index which requires simple manipulation for determination. According to the present invention, the mRNA amount in a noncancerous site can be determined using a microarray (DNA chip), real-time PCR or the like.

[0054] (3) Extraction of Total RNA

[0055] Total RNA is extracted from a noncancerous site tissue of a hepatocellular carcinoma type C case according to a known method. For example, 2 ml of Trizol (Invitrogen, Carsbad, Calif.) is added to about 0.1 g of a noncancerous site tissue and homogenized with Polytron to extract total RNA following the instruction. For qualitative assessment of the total RNA, RNA 6000 nano assay chip of Agilent Bioanalyzer 2100 (Agilent Technologies, Palo Alto, Calif.) can be used to perform electrophoresis analysis. Alternatively, mRNA can be extracted from total RNA using an oligo d(T) column.

[0056] The resulting total RNA or mRNA can be used for the following analyses.

[0057] (4) Expression Analysis with Oligonucleotide Microarray

[0058] Using the total RNA extracted in (3), cRNA labeled with, for example, biotin, Cy3, Cy5 or the like is synthesized. Those skilled in the art can synthesize the labeled cRNA by a known method. For example, biotin-labeled cRNA can be synthesized according to a manual for Affymetrix GeneChip expression analysis, or it can be synthesized according to a partially-modified manner of Example 1. Alternatively, labeled cRNA can be synthesized from mRNA.

[0059] Next, each gene expression signal is analyzed using a microarray. This microarray may be, for example, a commercially available Human Genome U 133 Plus 2.0 array (Affymetrix, Santa Clara, Calif.), CodeLink Human UniSet 20K I Bioarray (Amersham Biosciences), or Whole human genome oligo microarray kit (Agilent Technologies). Individual case may be applied to a single microarray, or pooled RNAs or cRNAs from multiple cases can be applied to a single microarray. Preferably, individual case is applied to a single microarray.

[0060] The number of cases used for determining an expression level of a gene using an oligonucleotide microarray is preferably 3 cases or more, preferably 4 cases or more, more preferably 5 cases or more per group.

[0061] Steps of hybridization between the labeled cRNA and probes on the microarray, subsequent washing and staining can be carried out according to the manual for individual microarray. For example, hybridization, washing and staining can be carried out with Fluidics Station 450 (Affymetrix) according to the manual. Following staining, a reader, for example, Scanner 3000 (Affymetrix) is used for reading the gene expression signals. Each of the read gene expression signal can be analyzed using an analysis software such as Gene Spring version 7 (Silicon Genetics, Redwood, Calif.) or the like.

[0062] Those skilled in the art are able to normalize the signal values appropriately. For example, per chip normalization with respect to the median as 1 may be carried out for each microarray, followed by per gene normalization with respect to the median as 1 for each gene.

[0063] In addition, genes having fluctuating expression levels between two groups can be extracted by cluster analysis and various significance tests, for example, using Gene Spring version 7.

[0064] (5) Expression Quantification by Real-Time PCR

[0065] Before preparing cDNA to be analyzed by real-time PCR from total RNA or mRNA, it is preferable to perform DNase I treatment in order to remove DNA mixed in RNA extracted in (3). For example, 10 unit of DNase I (Takara, Shiga, Japan) is added to 20 μg of total RNA, reacted in 50 μl at 37° C. for 20 minutes and then RNA can be purified with Trizol.

[0066] Subsequently, RNA treated with DNase is used to synthesize cDNA. For example, reverse transcriptase (e.g., 25 units of AMV reverse transcriptase XL (Life Sciences, Gaithersurg, Md.), SuperScript II, etc.) together with a random primer, oligo dT primer and the like are added to 10 μg of DNase I-treated RNA to synthesize cDNA in 100 μl.

[0067] Expression quantification by real-time PCR can use an instrument such as Rotor-Gene 3000 (Corbett Research, Mortalke, Australia), ABI Prism 7000 Sequence Detection System (Applied Biosystems, Foster, Calif.), ABI Prism 7500 Sequence Detection System (Applied Biosystems) or the like. For example, quantitative reaction can be carried out by preheating at 95° C. for 10 minutes followed by 45 cycles of 95° C. for 15 seconds and 60° C. for 60 seconds in a 25 μl reaction solution containing 10 ng cDNA, SYBR Green PCR Master Mix (Applied Biosystems) and 0.5 μM of various gene primers. Quantification of 18S rRNA as an endogenous control gene can use 0.25 ng of cDNA. Five standard samples for quantification are prepared with a five-fold dilution series of liver cDNA to prepare a standard curve, which can be used for an absolute quantitative analysis. Liver cDNA that showed the highest expression in each gene is used as the standard sample, and the amount (ng) of this cDNA can be used as the quantitative value. As an endogenous control gene, for example, a housekeeping gene, 18S rRNA, Glucuronidase, beta (GUSB) or glyceraldehyde-3-phosphate dehydrogenase (GAPDH) can be used. Preferably, 18S rRNA is used. The expression level of each gene can be indicated as a relative value obtained by dividing the expression quantitative value of each gene by the expression quantitative value of the endogenous control gene. The primer sequence used can be designed using, for example, primer 3 (http://frodo.wi.mit.edu/cgi-bin/primer3/primer3_www.cgi).

[0068] When expression levels of the genes are determined by real-time PCR, expression levels can be determined for each case, or expression levels can be determined for pooled RNAs from several cases. According to the present invention, the number of cases used for determining expression levels of genes using an oligonucleotide microarray is preferably 3 or more cases, preferably 4 or more cases, more preferably 5 or more cases per group.

[0069] (6) Expression Quantification by Immunohistochemistry or ELISA

[0070] According to the present invention, the gene expression can be quantified by employing immunohistochemistry or immunoassay.

[0071] For example, in the case of immunohistochemistry, the whole or the part of protein of the gene product is synthesized to produce an immune antibody. A thin section of a resected hepatic tissue is fixed, blocked, and then reacted with the immune antibody as a primary antibody. After washing, the resultant is reacted with a fluorescently-labeled or enzyme-labeled secondary antibody, and observed with a fluorescence microscope, or color development by enzyme reaction is observed with an optical microscope. Gene product-expressing cells are counted as stain-positive cells or stainability is quantified by image analysis, to quantify the expression as the positive rate or the quantitative value.

[0072] In the case of ELISA, a resected hepatic tissue is homogenized with a lysis solution, and the centrifuged supernatant is used as an antigen source. This immune antibody is provided on an immunoassay plate, blocked and then reacted with an antigen specimen. Following washing, the resultant is reacted again with the immune antibody as a primary antibody, and reacted with a labeled secondary antibody as described above. Detection is carried out by reading the quantitative value with a fluorometer or a colorimeter.

### 4. Selection of Recurrence-Related Gene

[0073] (1) Recurrence-Related Gene

[0074] According to the present invention, genes that have different gene expression levels in a noncancerous site of an early recurrent case and a noncancerous site of a late recurrent case of hepatocellular carcinoma type C are assumed as genes involved in occurrence/recurrence of hepatocellular carcinoma type C. Herein, an occurrence/recurrence-related gene is often simply referred to as a “recurrence-related gene”. The recurrence-related gene includes a gene whose gene expression level is increased in a noncancerous site of an early recurrent case as compared to a late recurrent case, or a gene whose gene expression level is increased in a noncancerous site of a late recurrent case as compared to an early recurrent case. Herein, genes whose expressions are increased in noncancerous sites of early recurrent cases or noncancerous sites of late recurrent cases are identical to genes whose expressions are decreased in noncancerous sites of late recurrent cases or noncancerous sites of early recurrent cases, respectively.

[0075] According to the present invention, a recurrence-related gene is preferably screened for each of a chronic hepatitis case or a liver cirrhosis case.

[0076] (2) Selection of Recurrence-Related Gene

[0077] Among the methods for determining gene expression levels described above to select the gene having fluctuating expression levels, a recurrence-related gene is selected either with a microarray or by performing real-time PCR. Alternatively, these methods can be carried out in combination so that genes that show fluctuating expression levels by either one or both of the methods can be selected. Preferably, the expression levels of the entire genes are determined with the microarray, and genes with fluctuating expression levels are assumed as recurrence-related gene candidates. Then, these recurrence-related gene candidates are subjected to real-time PCR, and a gene that also has fluctuating expression levels when detected by real-time PCR is selected as a gene involved in recurrence of hepatocellular carcinoma type C. In brief, preferably, recurrence-related gene candidates are detected with a microarray and the candidate genes are examined with real-time PCR, thereby selecting a recurrence-related gene.

[0078] Hereinafter, a method for selecting a recurrence-related gene or a candidate gene thereof with a microarray or by real-time PCR will be described.

[0079] (i) When a recurrence-related gene or a candidate gene thereof is selected using the results from determination of expression levels of genes with a microarray, the presence or the absence of a P (present) flag may be used as one of indicators. P flag is a mark that is given to a probe confirmed of an expression. For example, with respect to a certain probe, all of the probes can be selected when a P flag is displayed on at least one of multiple microarrays. Alternatively, with respect to a certain probe, only probes that have P flags on all of the multiple macroarrays can be selected. Genes corresponding to the selected probes are the genes of interest.

[0080] Furthermore, by a statistical procedure, genes that have significant difference in the expression levels between the early recurrent case and the late recurrent case can also be selected. Examples of such statistical procedures include Student's T test (ST), Welch's T test (WT), Cross-gene error model (CG), Mann-Whitney U test (MW) and the like. These statistical procedures may be employed alone or multiple procedures may be employed in combination.

[0081] When a gene having expression levels fluctuating according to recurrence difficulty between the two groups, i.e., the early recurrent case and the late recurrent case, is selected, the difference in the expression levels selected may be, for example, 1.8-folds, preferably 2.0-folds, more preferably 2.2-folds, more preferably 2.5-folds, and most preferably 3-folds.

[0082] For example, a recurrence-related gene of a chronic hepatitis case may be selected as follows (FIGS. 2, 4). Gene quantification is conducted for each case of the chronic hepatitis case group using a microarray. All of the probes that have a P flag on at least one microarray are selected. Then, the selected probes are subjected to all or some of the four statistical procedures mentioned above to further select probes that statistically have significant difference in the expression levels between the two groups, i.e., the early recurrent case and the late recurrent case in all of the procedures. Then, probes that have difference in the expression levels between the two groups, for example, by 2.0-folds or more are extracted and finally only probes having P flags on all of the microarrays of increased expressions are selected. Among the selected probes, probes whose expressions are increased in the early recurrent case are called probes for genes involved in early recurrence while probes whose expressions are increased in the late recurrent case are called probes for genes involved in late recurrence. Recurrence-related genes from liver cirrhosis cases can also be selected in the same manner (FIG. 3). More than one probe may be arranged on a single microarray for a single gene.

[0083] Examples of screening a gene involved in recurrence of hepatocellular carcinoma type C from 11 chronic hepatitis cases are described in Example 2 (a group of 5 early recurrent cases, a group of 6 late recurrent cases) and Example 4 (a group of 7 early recurrent cases, a group of 4 late recurrent cases).

[0084] An example of screening a gene involved in recurrence of hepatocellular carcinoma type C from 9 liver cirrhosis cases (a group of 5 early recurrent cases, a group of 4 late recurrent cases) is described in Example 3.

[0085] (ii) When a recurrence-related gene or a candidate gene thereof is selected using the results from the determination of gene expression levels by real-time PCR, comparison between the two groups, i.e., the early recurrent case and the late recurrent case, can be carried out using a known statistical procedure such as Mann Whitney U test. As a result, probes having a significance difference (P<0.05) or probes having a significance difference tendency (0.05<P<0.07) in addition to the probes having a significance difference can be selected. Genes corresponding to the selected probes are the genes of interest.

### 5. Microarray

[0086] The present invention provides a microarray arranged with probes for recurrence-related genes, an ELISA plate arranged with proteins obtained through expressions of the recurrence-related genes, and a protein chip where proteins obtained through expressions of the recurrence-related genes are fixed on a substrate.

[0087] (1) Microarray for Chronic Hepatitis Case

[0088] The present invention provides a microarray for a chronic hepatitis case, which is arranged with probes for one or more genes selected from the group consisting of genes containing a nucleotide sequence represented by any one of SEQ ID NOS: 1-115, preferably SEQ ID NOS: 1-97.

[0089] The nucleotide sequences represented by SEQ ID NOS: 1-97 are:

[0090] (i) SEQ ID NOS: 1-52: genes whose expressions are increased in the late recurrent group of chronic hepatitis cases (CHLa47, Example 2, Table 3);

[0091] (ii) SEQ ID NOS: 53-65: genes whose expressions are increased in the early recurrent group of chronic hepatitis cases (CHEa13, Example 2, Table 4);

[0092] (iii) SEQ ID NOS: 66-88: genes whose expressions are increased in the late recurrent group of chronic hepatitis cases (CHLb17, Example 4, Table 7.1); and

[0093] (iv) SEQ ID NOS: 89-97: genes whose expressions are increased in the early recurrent group of chronic hepatitis cases (CHEb9, Example 4, Table 7.1).

[0094] In addition, for examination of recurrence of hepatocellular carcinoma associated with chronic hepatitis, genes found in liver cirrhosis (SEQ ID NOS: 98-115) may also be used. Examples of such genes include those represented by SEQ ID NO: 109-111.

[0095] Herein, genes of (i) or (iii) are genes whose expressions are increased in noncancerous site tissues of the late recurrent groups (where the period between the surgery to recurrence being set to (i) 36 months or longer or (iii) 65 months or longer) as compared to the early recurrent groups having recurrence within 14 months or 36 months, respectively. In addition, genes of (ii) or (iv) are genes whose expressions are increased in noncancerous site tissues of the early recurrent groups (where the period between the surgery to recurrence being set to (ii) 14 months or shorter or (iv) 36 months or shorter) as compared to the late recurrent groups without recurrence for 36 months or longer or 65 months or longer, respectively.

[0096] The microarray of the present invention for a chronic hepatitis case is effective in examining recurrence of hepatocellular carcinoma type C in a hepatocellular carcinoma patient who is not associated with liver cirrhosis but associated with chronic hepatitis. For example, when expression levels of one or more genes selected from the group consisting of genes containing a nucleotide sequence represented by any one of (i) SEQ ID NOS: 1-52 and (iii) SEQ ID NOS: 66-88 are increased in a noncancerous site tissue of a patient, recurrence of a chronic hepatitis case can be assumed to occur after three years or longer following the surgery. Specifically, when expression levels of one or more genes selected from the group consisting of SEQ ID NOS: 66-88 are increased, recurrence of a chronic hepatitis case can be assumed to occur five years or longer after the surgery.

[0097] Furthermore, when expression levels of one or more genes selected from the group consisting of genes containing a nucleotide sequence represented by any one of (ii) SEQ ID NOS: 53-65 and (iv) SEQ ID NOS: 89-97 are increased, recurrence of a chronic hepatitis case can be assumed to occur within 41 months. Specifically, when expression levels of one or more genes selected from the group consisting of SEQ ID NOS: 53-65 are increased, recurrence of a chronic hepatitis case can be assumed to occur within 14 months.

[0098] (2) Microarray for Liver Cirrhosis Case

[0099] The present invention provides a microarray for a liver cirrhosis case, which is arranged with probes for one or more genes selected from the group consisting of genes containing a nucleotide sequence represented by any one of SEQ ID NOS: 1-115, preferably SEQ ID NOS: 98-115.

[0100] The nucleotide sequences represented by SEQ ID NOS: 98-115 are:

[0101] (v) SEQ ID NOS: 98-107: genes whose expressions are increased in the late recurrent group of liver cirrhosis cases (LCL9, Example 3, Table 5); and

[0102] (vi) SEQ ID NOS: 108-115: genes whose expressions are increased in the early recurrent group of liver cirrhosis cases (LCE8, Example 3, Table 6).

[0103] Herein, genes of (v) are genes whose expressions are increased in noncancerous site tissues of the late recurrent group (where the period between the surgery to recurrence being set to 37 months or longer) as compared to the early recurrent group having recurrence within 12 months. On the other hand, genes of (vi) are genes whose expressions are increased in noncancerous site tissues of the early recurrent group (where the period between the surgery to recurrence being set within 12 months) as compared to the late recurrent group without recurrence for 37 months or longer.

[0104] Moreover, for examination of recurrence of hepatocellular carcinoma associated with liver cirrhosis, genes found in chronic hepatitis (SEQ ID NOS: 1-98) may also be used. Examples of such genes include those represented by SEQ ID NO: 25 or 29.

[0105] The microarray of the present invention for liver cirrhosis cases is effective in examining recurrence of hepatocellular carcinoma in a patient with hepatocellular carcinoma type C associated with liver cirrhosis. For example, when expression levels of one or more genes selected from the group consisting of genes containing a nucleotide sequence represented by any one of SEQ ID NOS: 98-107 are increased in a noncancerous site tissue of a patient, recurrence of a liver cirrhosis case can be assumed to occur 3 years or longer after the surgery. On the other hand, when expression levels of one or more genes selected from the group consisting of genes containing a nucleotide sequence represented by any one of SEQ ID NOS: 108-115 are increased, recurrence of a liver cirrhosis case can be assumed to occur within 12 months after the surgery.

[0106] The present invention may be a microarray arranged with a probe for a gene selected from the group consisting of genes containing a nucleotide sequence represented by any one of SEQ ID NOS: 1-115. This microarray is effective in examining recurrence of hepatocellular carcinoma type C associated with chronic hepatitis or liver cirrhosis.

[0107] (3) The microarray of the present invention is arranged with nucleic acids comprising sequences of all or part of the genes mentioned above or complementary sequences thereof as probes. The probes can readily be designed by those skilled in the art according to a known method or the like, for example, by using existing software. Examples of methods for preparing a microarray include but not limited to a method in which probes prepared beforehand are densely spotted on a glass slide and a method in which oligonucleotides (probes) of about 25 mers are synthesized on a substrate.

[0108] (4) Determination Samples

[0109] With the microarray of the present invention, whether a hepatocellular carcinoma type C patient is prone to early or late recurrence of hepatocellular carcinoma can be presumed.

[0110] A determination sample may be, for example, a noncancerous site tissue collected upon resection of hepatocellular carcinoma or a noncancerous site tissue collected by biopsy or the like. From the collected noncancerous site tissue, expression levels of genes can be analyzed according to the method described in section “3. Determination of Gene Expression Level” above using the microarray, the ELISA plate or the protein chip of the present invention, or by employing immunohistochemistry.

[0111] Hereinafter, the present invention will be described more specifically by way of examples. The present invention, however, is not limited to these examples.

### Example 1

[0112] Preparation of determination samples used in Examples 2-4 and 8, and determination of the samples were carried out as follows.

[0113] (1) Extraction of Total RNA

[0114] To about 0.1 g of a noncancerous site tissue, 2 μl of Trizol (Invitrogen, Carsbad, Calif.) was added, which was homogenized with Polytron, and total RNA was extracted according to the instruction. In order to qualitatively assess the total RNA, RNA 6000 nano assay chip of Agilent Bioanalyzer 2100 (Agilent Technologies, Palo Alto, Calif.) was used to perform electrophoresis analysis.

[0115] (2) Expression Analysis with Oligonucleotide Microarray

[0116] Biotin-labeled cRNAs were synthesized using total RNAs from 20 cases. According to a partially modified manual for Affymetrix GeneChip expression analysis, first strand cDNA was synthesized using 10 μg of total RNA in the presence of RNase inhibitor at 42° C. for 2 hours. Second strand cDNA was synthesized according to the manual, and then using half the amount, biotin-cRNA was synthesized with a reaction solution based on MEGAscript T7 kit (Ambion, Austin, Tex.). Specifically, 43 μl of reaction solution containing 4 μl each of 75 mM ATP and 75 mM GTP, 3 μl each of 75 mM CTP and 75 mM UTP, 4 μl of T7 10× reaction buffer, 4 μl of T7 enzyme, 7.5 μl each of 10 mM biotin-11-CTP (PerkinElmer Life Sciences, Boston, Mass.) and 10 mM biotin-16-UTP (Roche Diagnostics, Basel, Switzerland), 1 μl of 200 unit/μl T7 RNA polymerase (Ambion), 11 of 40 unit/μl RNase inhibitor and the second strand cDNA was incubated at 37° C. for 9 hours to perform in vitro transcription. Then, biotin-cRNA was purified using an RNeasy MiniElute cleanup kit (Qiagen, Hilden, Germany). The cRNA was fragmentated according to the manual.

[0117] Hybridization with cRNA, washing and staining were performed using 20 Human Genome U133 Plus 2.0 arrays (Affymetrix, Santa Clara, Calif.) with Fluidics Station 450 (Affymetrix) according to the manual, and reading was performed with Scanner 3000 (Affymetrix). Each gene expression signal was analyzed using Gene Spring version 7 (Silicon Genetics, Redwood, Calif.). The signal values were normalized by per chip normalization for each microarray with respect to the median as 1, followed by per gene normalization for each gene with respect to the median as 1. Extraction of genes having fluctuating expression levels between the two groups according to cluster analysis and various significance test methods was carried out with Gene Spring version 7.

[0118] (3) Quantification of Expression by Real-Time PCR

[0119] In order to remove DNA from the extracted RNA, DNase I treatment was performed. Ten units of DNase I (Takara, Shiga, Japan) was added to 20 μg of total RNA, which was reacted in 50 μl at 37° C. for 20 minutes, and then RNA was purified with Trizol. 25 units of AMV reverse transcriptase XL (Life Sciences, Gaithersurg, Md.) and random primer were added to 10 μg of DNase I-treated RNA to synthesize cDNA in 100 μl.

[0120] For quantification of expression by real-time PCR, Rotor-Gene 3000 (Corbett Research, Mortalke, Australia) was used. In a 25 μl reaction solution containing 10 ng of cDNA, SYBR Green PCR Master Mix (Applied Biosystems) and 0.5 μM each of gene primers, preheating at 95° C. for 10 minutes followed by 45 cycles of 95° C. for 15 seconds and 60° C. for 60 seconds were conducted. For quantification of 18S rRNA, 0.25 ng of cDNA was used. Five five-fold series dilutions of liver cDNA were prepared to produce a standard curve, and then standard samples for quantification were used for an absolute quantitative analysis. Specifically, liver cDNA that showed the highest expression in each gene was used as a standard sample, and the amount (ng) of that cDNA was used as the quantitative value. As endogenous control genes, two housekeeping genes, 18S rRNA and glyceraldehyde-3-phosphate dehydrogenase (GAPDH) were used. Each gene expression level was expressed as a relative value obtained by dividing the quantitative value of expression of each gene by the quantitative value of expression of the endogenous control gene. The primer sequence used was designed using primer 3 (http://frodo.wi.mit.edu/cgi-bin/primer3/primer3_www.cgi). Table 9 shows the primer sequence and the annealing temperature for each gene. Mann-Whitney U test was used for a significance test between the two groups.

### Example 2

### Screening for Recurrence-Related Gene in Chronic Hepatitis (CHa)

[0121] CH cases were classified into the early recurrent case group whose period between the surgery and recurrence of hepatocellular carcinoma was within 14 months and the late recurrent case group whose period between the surgery and recurrence was 36 months or longer. Among the 15 CH cases, total of 11 cases, i.e., 5 cases from the early recurrent case group and 6 cases from the late recurrent case group, were subjected to screening for recurrence-related genes in chronic hepatitis (FIG. 1).

[0122] There were 29020 probes that showed P flags (associated with expression) on at least one of the 11 microarrays. Among these 29020 probes, when probes having significantly fluctuating expression levels due to difference in the recurrence difficulty (6:5) were determined by the four different statistical procedures described above, the number of probes was limited to about 1000-2000. 875 probes had significantly fluctuating expression levels in all of these four statistical procedures. Among these probes, 193 probes had expression levels that are at least twice as different between the early recurrent case group and the late recurrent case group, and 64 probes were selected which showed P flags on all of the microarrays with higher expressions (FIG. 2). Tables 3 and 4 show Late genes (genes that show increased expression in the late recurrent group) and Early genes (genes that show increased expression in the early recurrent group), respectively. Since some of the different probes arranged on the microarray were derived from the same gene, the numbers of genes were 47 and 13, respectively (total of 60 genes).

TABLE 3
Genes whose expressions are increased in late recurrent group of
chronic hepatitis cases (CHLa47)

| | SEQ ID | Fold | | | |
|---|---|---|---|---|---|
| No. | NO: | change | Accession No.^{a} | Category^{b} | Validation^{c} |
| 1 | 1 | 4.53 | NR_002196 | A1 | ◯ |
| 2 | 2 | 4.07 | NM_001155 | A2 | |
| | 3 | | or NM_004033 | | |
| 3 | 4 | 3.32 | NM_018687 | A3 | |
| 4 | 5 | 2.82 | NM_004343 | A4 | |
| 5 | 6 | 2.81 | NM_198536 | A5 | |
| 6 | 7 | 2.77 | NM_000918 | A6 | |
| 7 | 8 | 2.75 | NM_138425 | A7 | |
| 8 | 9 | 2.71 | NM_021128 | A8 | |
| 9 | 10 | 2.70 | NM_004335 | A9 | ▴ |
| 10 | 11 | 2.60 | NM_002085 | A10 | |
| 11 | 12 | 2.54 | NM_016145 | A11 | |
| 12 | 13 | 2.50 | NM_002150 | A12 | |
| 13 | 14 | 2.47 | NM_002804 | A13 | |
| 14 | 15 | 2.46 | NM_005861 | A14 | |
| 15 | 16 | 2.40 | NM_004152 | A15 | |
| 16 | 17 | 2.39 | NM_000980 | A16 | |
| 17 | 18 | 2.37 | NM_022145 | A17 | X |
| 18 | 19 | 2.35 | NM_012094 | A18 | |
| 19 | 20 | 2.34 | NM_022839 | A19 | |
| | 21 | | or NM_176805 | | |
| 20 | 22 | 2.31 | BC016013 | E1 | X |
| 21 | 23 | 2.30 | NM_021149 | A20 | ◯ |
| 22 | 24 | 2.29 | NM_145202 | A21 | |
| 23 | 25 | 2.24 | NM_003689 | A22 | |
| 24 | 26 | 2.21 | NM_015965 | A23 | |
| 25 | 27 | 2.20 | NM_005617 | D1 | ◯ |
| 26 | 28 | 2.19 | NM_000858 | A24 | |
| 27 | 29 | 2.18 | NM_005219 | A25 | |
| 28 | 30 | 2.18 | NM_006233 | A26 | |
| 29 | 31 | 2.18 | NM_025029 | B1 | |
| 30 | 32 | 2.17 | NM_003960 | A27 | ▴ |
| 31 | 33 | 2.16 | NM_005022 | A28 | |
| 32 | 34 | 2.16 | NM_005505 | A29 | |
| 33 | 35 | 2.13 | NM_006579 | A30 | |
| 34 | 36 | 2.12 | NM_033196 | D2 | |
| 35 | 37 | 2.09 | NM_021805 | A31 | |
| 36 | 38 | 2.08 | NM_002004 | A32 | |
| 37 | 39 | 2.07 | NM_001006946 | A33 | |
| | 40 | | or NM_002997 | | |
| 38 | 41 | 2.06 | NM_004069 | A34 | |
| | 42 | | or NM_021575 | | |
| 39 | 43 | 2.06 | NM_153039 | E2 | X |
| 40 | 44 | 2.05 | NM_000221 | A35 | |
| | 45 | | or NM_006488 | | |
| 41 | 46 | 2.05 | NM_016068 | A36 | |
| 42 | 47 | 2.04 | NM_002046 | A37 | |
| 43 | 48 | 2.03 | NM_001428 | A38 | |
| 44 | 49 | 2.02 | NM_003910 | A39 | |
| 45 | 50 | 2.02 | NM_006444 | D3 | X |
| 46 | 51 | 2.02 | Z97353 | E3 | |
| 47 | 52 | 2.01 | AW001036 | E4 | |

^{a}Genes from which probes for the microarray were derived, which itself may not be a gene that had fluctuating expressions. Two numbers indicate the presence of variant mRNAs and both were subjected to expression level analysis.
^{b}Classification into five categories was based on the position of the probe on the gene structure. A. Exon sequence of the gene B. Intron sequence of the gene, placed in the same direction as the gene C. Intron sequence of the gene, placed in the reverse direction from the gene D. Sequence adjacent to the gene, placed in the same direction as the gene E. Sequence outside the gene
^{c}Among those that have been subjected to expression quantification by real-time PCR, those verifiable are indicated as (P < 0.05), those having tendency to verification as ▴ (0.05 < P < 0.07), those unverifiable as ◯, those unquantifiable as X, and those with low signal that seem to be unquantifiable as faint X.
Gene overlaps: CHLa-3 = LCE-1 (Table 6); CHLa-20 = CHLb-8, CHLa-24 = CHLb-16, CHLa-25 = CHLb-10 (Table 7)

[0123] As can be appreciated from the category classification in Table 3 (see also FIG. 8), only category A represents genes (substantive genes that codes for proteins). The remaining categories represent probes that were selected as probes having fluctuating expressions by being positioned in a region of a gene, but which were introns or sequences outside the gene close to the gene, or which were in the reverse direction from the gene code. Thus, these may not always indicate expression fluctuation of mRNA coding for protein. The fluctuation in expression may not be of the referred gene itself.

TABLE 4
Genes whose expressions are increased in early recurrent group of
chronic hepatitis cases (CHEa13)

| | SEQ | | | | |
|---|---|---|---|---|---|
| No. | ID NO: | Fold change | Accesion No.^{a} | Category^{b} | Validation^{c} |
| 1 | 53 | 3.16 | NM_015199 | D1 | X |
| 2 | 54 | 2.67 | NM_006007 | A1 | ◯ |
| 3 | 55 | 2.54 | AF085902 | E1 | X |
| 4 | 56 | 2.33 | NM_006705 | A2 | |
| 5 | 57 | 2.30 | NM_006275 | A3 | |
| 6 | 58 | 2.23 | NM_018948 | B1 | |
| 7 | 59 | 2.12 | NM_001461 | B2 | |
| 8 | 60 | 2.08 | AI417268 | E2 | X |
| 9 | 61 | 2.05 | NM_002570 | B3 | |
| 10 | 62 | 2.03 | NM_002015 | B4 | |
| 11 | 63 | 2.02 | NM001455 | B5 | |
| 12 | 64 | 2.02 | NM_016282 | B6 | X |
| 13 | 65 | 2.01 | NM_014781 | B7 | |

^{a}Genes from which probes for the microarray were derived, which itself may not be a gene that had fluctuating expressions.
^{b}Classification into five categories was based on the position of the probe on the gene structure. A. Exon sequence of the gene B. Intron sequence of the gene, placed in the same direction as the gene C. Intron sequence of the gene, placed in the reverse direction from the gene D. Sequence adjacent to the gene, placed in the same direction as the gene E. Sequence outside the gene
^{c}Among those that have been subjected to expression quantification by real-time PCR, those verifiable are indicated as (P < 0.05), those having tendency to verification as ▴ (0.05 < P < 0.07), those unverifiable as ◯, those unquantifiable as X, and those with low signal that seem to be unquantifiable as faint X.
Gene overlap: CHEa-1 = CHEb-3 (Table 7)

[0124] Difference in the background factors of the cases between the two groups is shown in Table 2. Slightly fluctuating expression levels were seen between serum albumin and alpha-fetoprotein, with the tendency of a lower albumin value and a higher alpha-fetoprotein value seen in the early recurrent case group.

TABLE 2
Comparison of background factors of cases used for microarray analysis

| | | Chronic hepatitis | | | Liver cirrhosis | | |
|---|---|---|---|---|---|---|---|
| Variable | | Early | Late | P | Early | Late | P |
| No. | | 5 | 6 | | 5 | 4 | |
| Recurrence time (M) | | 10.6 ± 1.9 | 63.7 ± 8.8 | 0.006 | 9.2 ± 0.9 | 46.5 ± 5.5 | 0.014 |
| Sex (Male/Female) | | 4/1 | 6/0 | | 3/2 | 2/2 | |
| Age (y) | | 64.8 ± 2.2 | 63.8 ± 2.7 | | 62.8 ± 2.5 | 65.3 ± 1.9 | |
| Tumor size (mm) | | | | | | | |
| Tumor histological | | 2/3/0 | 1/4/1 | | 3/2/0 | 1/1/2 | |
| grade (WD/MD/PD) | | | | | | | |
| ICG-R15 (%) | (<10)^{a} | 11.5 ± 2.8 | 10.0 ± 1.8 | | 32.7 ± 10.1 | 16.3 ± 1.3 | |
| Alb (g/dl) | (6.7-8.3) | 3.88 ± 0.26 | 4.53 ± 0.11 | 0.043 | 3.92 ± 0.13 | 4.03 ± 0.24 | |
| AST (IU/l) | (8-38) | 44.0 ± 8.3 | 40.0 ± 4.1 | | 57.4 ± 4.7 | 46.0 ± 4.5 | |
| ALT (IU/l) | (40-44) | 46.4 ± 15.3 | 44.2 ± 7.6 | | 50.6 ± 8.0 | 34.8 ± 5.2 | |
| T. bil (mg/dl) | (0.3-1.2) | 0.73 ± 0.10 | 0.64 ± 0.11 | | 1.02 ± 0.18 | 0.75 ± 0.06 | |
| AFP (ng/ml) | (<10) | 525 ± 327 | 24.3 ± 16.4 | 0.045 | 421 ± 251 | 63.5 ± 46.8 | |
| HCV RNA/18S rRNA | (unit) | 33400 ± 20100 | 19500 ± 18000 | | 149100 ± 82100 | 18400 ± 11100 | 0.025 |

^{a}Normal value ranges are shown in parentheses.
The values are shown in average ± standard error. When the months of recurrence are unknown, the maximum months confirmed without recurrence were used.
WD, well differentiated;
MD, moderately differentiated;
PD, poorly differentiated;
ICG-R15, rate of indocyanine green remaining 15 minutes after intravenous injection;
Alb, serum albumin;
AST, aspirate aminotransferase;
ALT, alanine aminotransferase;
T. bil, total bilirubin;
AFP, alpha-fetoprotein;
HCV RNA/18S rRNA, quantitative value of HCV RNA normalized with quantitative value of 18S rRNA.

### Example 3

### Screening for Recurrence-Related Gene in Liver Cirrhosis Case (LC)

[0125] LC cases whose period between the surgery to recurrence of hepatocellular carcinoma was within 12 months were grouped as the early recurrent case group while LC cases whose period between the surgery to recurrence was 37 months or longer were grouped as the late recurrent case group. Among the 22 LC cases, total of 9 cases, i.e., 5 cases from the early recurrent case group and 4 cases from the late recurrent case group, were subjected to screening for recurrence-related genes in liver cirrhosis cases (FIG. 1).

[0126] There were 28450 probes that showed P flags (associated with expression) on at least one of the 9 microarrays. Among these 28450 probes, when probes having significantly fluctuating expression levels due to difference in the recurrence difficulty (4:5) were determined by three different statistical procedures (Student's T test, Welch's T test, Cross-gene error model), the number of probes was limited to about 400-1000. 297 probes had significantly fluctuating expression levels in all of these statistical procedures. Among these probes, 111 probes had expression levels that are at least twice as different between the early recurrent case group and the late recurrent case group, and 17 probes were selected which showed P flags on all of the microarrays of higher expressions (FIG. 3). Tables 5 and 6 show Late and Early genes, respectively.

TABLE 5
Genes whose expressions are increased in late recurrent group
of liver cirrhosis cases (LCL9)

| | SEQ ID | Fold | | | |
|---|---|---|---|---|---|
| No. | NO: | change | Accesion No.^{a} | Category^{b} | Validation^{c} |
| 1 | 98 | 2.66 | NM_006838 | A1 | ◯ |
| 2 | 99 | 2.57 | NM_004936 | A2 | X |
| | 100 | | or NM_078487 | | |
| 3 | 101 | 2.54 | NM_022824 | B1 | ◯ |
| 4 | 102 | 2.30 | 6NM_005266 | D1 | X |
| 5 | 103 | 2.19 | NM_000582 | A3 | ◯ |
| 6 | 104 | 2.06 | NM_005919 | B2 | X |
| 7 | 105 | 2.06 | NM_004612 | B3 | X |
| 8 | 106 | 2.04 | T66145 | E1 | X |
| 9 | 107 | 2.00 | XM_496688 | A4 | X |

^{a}Genes from which probes for the microarray were derived, which itself may not be a gene that had fluctuating expressions. Two numbers indicate the presence of variant mRNAs and both were subjected to expression level analysis.
^{b}Classification into five categories was based on the position of the probe on the gene structure. A. Exon sequence of the gene B. Intron sequence of the gene, placed in the same direction as the gene C. Intron sequence of the gene, placed in the reverse direction from the gene D. Sequence adjacent to the gene, placed in the same direction as the gene E. Sequence outside the gene
^{c}Among those that have been subjected to expression quantification by real-time PCR, those verifiable are indicated as (P < 0.05), those having tendency to verification as ▴ (0.05 < P < 0.07), those unverifiable as ◯, and those unquantifiable as X.

TABLE 6
Genes whose expressions are increased in early recurrent group of
liver cirrhosis cases (LCE8)

| | SEQ ID | Fold | | | |
|---|---|---|---|---|---|
| No. | NO: | change | Accesion No.^{a} | Category^{b} | Validation^{c} |
| 1 | 108 | 3.74 | NM_018687 | A1 | ◯ |
| 2 | 109 | 2.22 | NM_178507 | B1 | ◯ |
| 3 | 110 | 2.20 | NM_032853 | B2 | ◯ |
| 4 | 111 | 2.19 | AW664026 | B3 | ◯ |
| 5 | 112 | 2.16 | NM_004926 | A2 | ◯ |
| 6 | 113 | 2.11 | NM_015272 | A3 | X |
| 7 | 114 | 2.10 | AA855042 | E1 | ◯ |
| 8 | 115 | 2.10 | AF001892 | A4 | ◯ |

^{a}Genes from which probes for the microarray were derived, which itself may not be a gene with fluctuating expression.
^{b}Classification into five categories was based on the position of the probe on the gene structure. A. Exon sequence of the gene B. Intron sequence of the gene, placed in the same direction as the gene C. Intron sequence of the gene, placed in the reverse direction from the gene D. Sequence adjacent to the gene, placed in the same direction as the gene E. Sequence outside the gene
^{c}Among those that have been subjected to expression quantification by real-time PCR, those verifiable are indicated as (P < 0.05), those having tendency to verification as ▴ (0.05 < P < 0.07), those unverifiable as ◯, and those unquantifiable as X.
Gene overlap: LCE-1 = CHLa-3 (Table 3)

[0127] Table 2 above shows comparison of background factors of the cases between the two groups. A difference in the amounts of hepatitis C virus in hepatic tissues was observed. The amount of virus was higher in the early recurrent group of liver cirrhosis.

### Example 4

### Screening of Recurrence-Related Gene in Chronic Hepatitis (CHb

[0128] CH cases were grouped into the early recurrent case group whose period between the surgery and recurrence of hepatocellular carcinoma was within 36 months and the late recurrent case group whose period between the surgery and recurrence was 65 months or longer. Among the 15 CH cases, total of 11 cases, i.e., 7 cases from the early recurrent case group and 4 cases from the late recurrent case group, were subjected to screening for recurrence-related genes in chronic hepatitis (FIG. 1).

[0129] There were 29020 probes that showed P flags (associated with expression) on at least one of 111 microarrays. Among these 29020 probes, when probes having significantly fluctuating expression levels due to difference in the recurrence difficulty (4:7) were determined by three different statistical procedures (Student's T test, Welch's T test, Cross-gene error model), 485 probes had significantly fluctuating expression levels in all of these three statistical procedures. Among these probes, 114 probes had expression levels that were at least twice as different between the early recurrent case group and the late recurrent case group, and 27 probes were selected which showed P flags on all of the microarrays of higher expressions (FIG. 4). Tables 7.1 and 7.2 show Late and Early genes, respectively. Since some of the different probes arranged on the microarray were derived from the same gene, the numbers of genes were 17 and 9, respectively (total of 26 genes).

TABLE 7.1
Genes whose expressions are increased in late recurrent
group of chronic hepatitis cases (CHLb 17)

| | SEQ | Fold | | | |
|---|---|---|---|---|---|
| No. | ID NO: | change | Accesion No.^{a} | Category^{b} | Validation^{c} |
| 1 | 66 | 3.11 | NM_001101 | A1 | ◯ |
| 2 | 67 | 2.90 | NM_201651 | A2 | |
| 3 | 68 | 2.85 | NM_002165 | A3 | |
| | 69 | | or NM_181353 | | |
| 4 | 70 | 2.76 | NM_003251 | A4 | |
| 5 | 71 | 2.70 | NM_024006 | A5 | |
| | 72 | | or NM_206824 | | |
| 6 | 73 | 2.44 | NM_001096 | A6 | |
| | 74 | | or NM_198830 | | |
| 7 | 75 | 2.43 | NM_016440 | A7 | |
| 8 | 76 | 2.34 | BC016013 | E1 | X |
| 9 | 77 | 2.31 | NM_015533 | A8 | |
| 10 | 78 | 2.22 | NM_005617 | A9 | ◯ |
| 11 | 79 | 2.21 | NM_015675 | A10 | ◯ |
| 12 | 80 | 2.19 | NM_000201 | A11 | |
| 13 | 81 | 2.11 | NM_005710 | A12 | |
| | 82 | | or NM_144494 | | |
| 14 | 83 | 2.04 | NM_002756 | A13 | |
| | 84 | | or NM_145109 | | |
| | 85 | | or NM_145110 | | |
| 15 | 86 | 2.03 | NM_024595 | A14 | |
| 16 | 87 | 2.01 | NM_015965 | A15 | |
| 17 | 88 | 2.01 | NM_012458 | A16 | |

TABLE 7.2
Genes whose expressions are increased in early recurrent group
of chronic hepatitis cases (CHEb 9)

| | SEQ ID | | | | |
|---|---|---|---|---|---|
| No. | NO: | Fold change | Accesion No.^{a} | Category^{b} | Validation^{c} |
| 1 | 89 | 2.88 | AI015847 | E1 | |
| 2 | 90 | 2.72 | NM_030627 | B1 | X |
| 3 | 91 | 2.30 | NM_015199 | D1 | X |
| 4 | 92 | 2.21 | NM_001801 | B2 | |
| 5 | 93 | 2.13 | AA883831 | E2 | X |
| 6 | 94 | 2.11 | NM_014890 | B3 | |
| 7 | 95 | 2.03 | AY010114 | E3 | X |
| 8 | 96 | 2.01 | NM_017614 | B4 | |
| 9 | 97 | 2.00 | NM_022496 | B5 | |

^{a}Genes from which probes for the microarray were derived, which itself may not be a gene that had fluctuating expression. Two or more numbers indicate the presence of variant mRNAs and both were subjected to expression level analysis.
^{b}Classification into five categories was based on the position of the probe on the gene structure.
A. Exon sequence of the gene
B. Intron sequence of the gene, placed in the same direction as the gene
C. Intron sequence of the gene, placed in the reverse direction from the gene
D. Sequence adjacent to the gene, placed in the same direction as the gene
E. Sequence outside the gene
^{c}Among those that have been subjected to expression quantification by real-time PCR, those verifiable are indicated as (P < 0.05), those having tendency to verification as ▴ (0.05 < P < 0.07), those unverifiable as ◯, those unquantifiable as X, and those with low signal that seem to be unquantifiable as faint X.
Gene overlaps: CHLb-8 = CHLa-20, CHLb-16 = CHLa-24, CHLb-10 = CHLa-25 (Table 3); CHEb-3 = CHEa-1 (Table 4).

[0130] Since the late recurrent group was set as no recurrence for 65 months or longer in this example, gene expressions were shown that were particularly specific to the late recurrent group.

### Example 5

### Overlapping of Candidate Genes

[0131] Overlapping was considered for the recurrence-related genes (CHa, LC, CHb) obtained from the three two-group comparisons in Examples 2-4.

[0132] The results are shown in FIG. 5. There were no overlapping genes among chronic hepatitis (CHa, CHb) and liver cirrhosis (LC). For chronic hepatitis cases that were subjected to different two-group classifications, four genes were commonly extracted. One of the Late genes from chronic hepatitis was extracted as an Early gene from liver cirrhosis.

[0133] Thus, different genes in chronic hepatitis and liver cirrhosis were shown to result in expression fluctuations with respect to the risk of recurrence. Accordingly, chronic hepatitis and liver cirrhosis seem to have different mechanisms for the occurrence of cancer. Specifically, the method of the present invention for screening a gene involved in occurrence of cancer for each case is extremely useful in that a recurrence-related gene can be selected more accurately.

### Example 6

### Cluster Classification of Cases According to Recurrence-Related Genes in Chronic Hepatitis

[0134] Cluster classification was performed in order to verify whether the recurrence-related gene (CHa) obtained in Example 2 can be used for classifying cases for the risk of recurrence.

[0135] When cluster classification of the cases were conducted based on the expression patterns of 64 probes for candidate genes in chronic hepatitis, 11 chronic hepatitis cases were correctly classified into two groups, i.e., 6 cases from the late group and 5 cases from the early group (FIG. 6). However, when liver cirrhosis cases were subjected to cluster classification using the same gene expression patterns, these cases were not correctly classified into two groups (FIG. 6).

[0136] Therefore, these expression patterns of 64 probes can be used for predicting risk of recurrence in chronic hepatitis.

### Example 7

### Cluster Classification of Cases According to Recurrence-Related Genes in Liver Cirrhosis

[0137] Similar to Example 6, cluster classification was also conducted for related genes in liver cirrhosis obtained in Example 3.

[0138] When cluster classification of the cases were conducted based on the expression patterns of 17 probes for candidate genes in liver cirrhosis, 9 liver cirrhosis cases were correctly classified into two groups, i.e., 4 cases from the late group and 5 cases from the early group (FIG. 7). However, when chronic hepatitis cases were subjected to cluster classification using the same gene expression patterns, these cases were not correctly classified into two groups (FIG. 7).

[0139] Therefore, these expression patterns of 17 probes can be used for predicting recurrence difficulty in liver cirrhosis.

[0140] Positions of Candidate Gene Probes on Genes

[0141] 54675 probes were used for the microarrays in the examples, which were far greater than the number of human genome genes. Specifically, since multiple transcripts have been reported for a single gene or short transcripts with unknown functions have been reported, the 54675 probes may include multiple probes for a single gene. Thus, in order to understand the roles of the probes, probe sequences used for the microarrays were classified into five patterns based on the positions on the DNA sequences of the genes (FIG. 8). The genes indicated in Tables 3-7 were classified into probe categories as follows: A, placed on exon of the gene in the same direction, i.e., detection of mRNA of the gene; B, placed on intron containing exon of the gene or intron alone; C, placed on complementary strand of the gene; D, placed on sequence outside the gene containing or not containing the 3′end of the gene; D, placed on regions where the gene is undefined. Table 8 shows counts of the extracted genes according to the categories. Probes classified into B, D and E were detected as well as those classified into A, and thus it may be meaningful to verify whether they act as transcripts.

TABLE 8
Classification of genes into Categories

| | | |
|---|---|---|
| Up-regulated | Up-regulated | Up-regulated |
| in CH (a) | in LC | in CH (b) |

| | Late | Early | Late | Early | Late | Early |
|---|---|---|---|---|---|---|
| A | 39 | 3 | 4 | 4 | 16 | 0 |
| B | 1 | 7 | 3 | 3 | 0 | 5 |
| C | 0 | 0 | 0 | 0 | 0 | 0 |
| D | 3 | 1 | 1 | 0 | 0 | 1 |
| E | 4 | 2 | 1 | 1 | 1 | 3 |
| Total | 47 | 13 | 9 | 8 | 17 | 9 |

### Example 8

### Quantification of Expression And Verification of Two-Group Comparison by Real-Time PCR

[0142] FIG. 9 shows the number of genes designed by PCR (design), the number of genes quantifiable by real-time PCR (capable of PCR), and the number of genes whose difference in the expression levels between the two groups could be verified from these results (verifiable). The number of genes whose difference in the expression levels between the two groups could be verified was the number of genes whose difference in the expression levels was proven between the early recurrent group with recurrence within 2 years and the late recurrent group without recurrence for 3 years or longer. Table 9 shows the primer sequences used while Table 10 shows the results from significance tests between various two groups.

TABLE 9
Primer sequences used for real-time PCR

| | Primer sequence | | | | |
|---|---|---|---|---|---|
| No. | Forward (5′-3′) | SEQ ID NO: | Reverse (5′-3′) | SEQ ID NO: | Annealing |

| | | | | | |
|---|---|---|---|---|---|
| CHLa-1 | agcccaacatcaaagacacc | 116 | gctcagctctgggatgatgt | 117 | 60 |
| CHLa-2 | agcatcttcggttggtgttc | 118 | ctacggccagcattagcttc | 119 | 60 |
| CHLa-3 = LCE-1 | atggccgcacaatagaactc | 120 | tgtcccgtagcaccttctgt | 121 | 65 |
| CHLa-4 | tggatcgaatccaaacacaa | 122 | ctggcttgtctgcaaacctt | 123 | 60 |
| CHLa-5 | cccgacataccttcggacta | 124 | ctgtgaagccaagatgcaga | 125 | 60 |
| CHLa-6 | gacggcagagaggatcaca | 126 | catcaaaagccacgtcttca | 127 | 60 |
| CHLa-7 | ctgcaacgacatgggtaaga | 128 | ctgggcttcgtaggacttga | 129 | 60 |
| CHLa-8 | gatcatccctgtacgctgct | 130 | agcagcttctcgatcaggtc | 131 | 65 |
| CHLa-9 | tgctggggataggaattctg | 132 | cattgcgacactccatcact | 133 | 60 |
| CHLa-10 | tcagcaagatctgcgtgaac | 134 | ggggcaggtccttctctatc | 135 | 60 |
| CHLa-11 | ccggactacatgaacctgct | 136 | gcagagatggacagcatgaa | 137 | 60 |
| CHLa-12 | cctccgaatggtacctgaaa | 138 | ttcatagttggccaccacaa | 139 | 60 |
| CHLa-13 | agtgactcggcaggagaaga | 140 | cttggagctcatgggtgact | 141 | 60 |
| CHLa-14 | cgagctgcactcctacctct | 142 | gccatgtacttgtcgtgctt | 143 | 60 |
| CHLa-15 | gggcgagggaatagtcagag | 144 | aatcctcgtcttgtcgttgg | 145 | 60 |
| CHLa-17 | ttccttttggccaccttatg | 146 | cctgtggttccaatatccttg | 147 | 60 |
| CHLa-18 | ctgccagggtttgtggag | 148 | gagccgaaccttgccttc | 149 | 60 |
| CHLa-20 = CHLb-8 | gtcattttaggaacattatg | 150 | gagaacaccaatgcaatctt | 151 | 60 |
| CHLa-21 | ccgtcatctgggtgactttt | 152 | aacaaccggacgtcatctgt | 153 | 60 |
| CHLa-22 | ccagctggtggtgctgtt | 154 | cttggtgcctggaaggatg | 155 | 60 |
| CHLa-23 | aacccttgggatggaaaatc | 156 | tggtcaggtgcgtgtaggta | 157 | 60 |
| CHLa-24 = CHLb-16 | gggcccatcgactacaaac | 158 | gctcacggttccacttcatt | 159 | 60 |
| CHLa-25 = CHLb-10 | gacgtgcagaaatggcacct | 160 | cagtcacacggcagatggtt | 161 | 60 |
| CHLa-26 | ggcctgtttgatgtggtcat | 162 | cggtcctttgagctttcttg | 163 | 60 |
| CHLa-27 | cagcaaattgccacagagaa | 164 | ggaacaggagcacgactagg | 165 | 60 |
| CHLa-29 | caaccacgagggatccag | 166 | caagtctctgccccatccta | 167 | 60 |
| CHLa-30 | tgcctcgaaccctcatactc | 168 | tgtccacatactccgtccag | 169 | 60 |
| CHEa-1 = CHEb-3 | tgcattaaaccagtgatgaagaa | 170 | acagcgatacccactcttgc | 171 | 60 |
| CHEa-2 | ggtgtcagagccagttgtca | 172 | aaatttccacatcggcagtc | 173 | 60 |
| CHEa-3 | caggttttgaaagcaagtttga | 174 | ttgccagaaaaagaagcagag | 175 | 60 |
| CHEa-4 | caatgtgaccttctgtgtgct | 176 | cgcactatgtcgatgtcgtt | 177 | 60 |
| CHEa-6 | aaaaccctgtgccttacacaa | 178 | gaggctgtgtctcaatcacct | 179 | 60 |
| LCL-1 | atgccggtgacacaacagta | 180 | gacgaacatcaattccagca | 181 | 60 |
| LCL-2 | cgttaagtttacggccaacg | 182 | cgcaccttctccactagtcc | 183 | 60 |
| LCL-3 | tgggtatttgtggcaattca | 184 | tggcatatgacccaactgac | 185 | 60 |
| LCL-4 | aatgcacgtgtgtgtgtgtg | 186 | tcctctgtcccaacctcttg | 187 | 60 |
| LCL-5 | ttgcagtgatttgcttttgc | 188 | gccacagcatctgggtattt | 189 | 60 |
| LCL-6 | gttcgagaagcaccgagaag | 190 | ttaaagcctcccttggctct | 191 | 60 |
| LCL-7 | atcaaagggcaaatggaaca | 192 | catgcacccttgtacactgaa | 193 | 60 |
| LCL-8 | tttgttttagtgcgagttaccg | 194 | tctgtttttgttcattaagcactttt | 195 | 60 |
| LCL-9 | tgtaaaatcatttcccccactc | 196 | ttaagccccaactgtccaac | 197 | 60 |
| LCE-2 | agcggtacaggtgagcagag | 198 | gggctccttcctgttactga | 199 | 60 |
| LCE-3 | acacctgctgggctgtaaac | 200 | gacagaaaaggttggctgga | 201 | 60 |
| LCE-4 | tccaaggtggagaggtgttc | 202 | tgtgtgactctcacgccact | 203 | 60 |
| LCE-5 | gcctgtaagtacggggacaa | 204 | ctcttcagcgttgtggatga | 205 | 60 |
| LCE-6 | cgtggatatcatgccacatc | 206 | ttccttgctgcattttctca | 207 | 60 |
| LCE-7 | cagtgtgaccttttctgaggtg | 208 | caatgcaattctccttggcta | 209 | 60 |
| LCE-8 | gggcatgaaatgaagacacc | 210 | aggaagttcacagccacctg | 211 | 60 |
| CHLb-1 | acagagcctcgcctttgc | 212 | cacgatggaggggaagac | 213 | 60 |
| CHLb-2 | ccgaatcagtacctccctca | 214 | gaatcccctggaggctaatg | 215 | 60 |
| CHLb-3 | gcaggtaaacgtgctgctct | 216 | ctccaactgaaggtccctga | 217 | 60 |
| CHLb-4 | ggaagtcgaggacgagagtg | 218 | acttgtcccgtcatttcctg | 219 | 60 |
| CHLb-5 | tgagctccctggtgtctctc | 220 | cacatcaggctcacgttgat | 221 | 60 |
| CHLb-11 | gtgtacgagtcggccaagtt | 222 | ggatgagcgtgaagtggatt | 223 | 60 |
| CHEb-2 | tggatacagttctttttgcttttt | 224 | gcacgtgcctgcaagttat | 225 | 60 |
| CHEb-4 | gtggttggttgtggtgagtg | 226 | cgtgggggctgatctaacta | 227 | 60 |
| CHEb-5 | gggaagatttgaattccattg | 228 | tttaaaatatgaccagatgg | 229 | 60 |
| CHEb-7 | cagactgttgctggtcctga | 230 | gccctgcaccttgagtaaaa | 231 | 60 |

Overlap genes are shown together and linked with =

TABLE 10
Quantitative analysis and two-group comparison by Real-time PCR

| | Chronic hepatitis | | | Liver cirrhosis | | LC early:CH late | | |
|---|---|---|---|---|---|---|---|---|
| | 13 | 13 | 20 | 12 | 24 | 12 | 12 | 24 |
| | M:37 M | M:65 M | M:37 M | M:37 M | M:37 M | M:37 M | M:65 M | M:37 M |
| No. | (5:6) | (5:4) | (7:6) | (8:4) | (14:4) | (8:6) | (8:4) | (14:6) |
| CHLa-1 | | | | E0.071 | E0.06 | | | |
| CHLa-2 | 0.004 | 0.016 | 0.001 | | | 0.02 | 0.048 | 0.002 |
| CHLa-3 = LCE-1 | 0.009 | 0.032 | 0.008 | | | 0.003 | 0.016 | <0.001 |
| CHLa-4 | 0.009 | 0.032 | 0.008 | | | 0.013 | 0.048 | 0.001 |
| CHLa-5 | 0.004 | 0.016 | 0.002 | | | 0.001 | 0.004 | <0.001 |
| CHLa-6 | 0.009 | 0.032 | 0.002 | | | 0.008 | 0.048 | 0.001 |
| CHLa-7 | 0.004 | 0.016 | 0.008 | | | | | 0.006 |
| CHLa-8 | 0.004 | 0.016 | 0.001 | | | 0.003 | 0.016 | <0.001 |
| CHLa-9 | 0.03 | | 0.051 | nd | nd | nd | nd | nd |
| CHLa-10 | 0.004 | 0.016 | 0.002 | | | 0.05 | 0.028 | <0.001 |
| CHLa-11 | 0.004 | 0.016 | 0.022 | | | 0.043 | | 0.006 |
| CHLa-12 | 0.004 | 0.016 | 0.001 | | | 0.059 | | 0.005 |
| CHLa-13 | 0.004 | 0.016 | 0.001 | | | 0.001 | 0.008 | <0.001 |
| CHLa-14 | 0.03 | | 0.008 | nd | nd | nd | nd | nd |
| CHLa-15 | 0.009 | 0.032 | 0.035 | | | 0.008 | 0.048 | 0.001 |
| CHLa-17 | — | — | — | — | — | — | — | — |
| CHLa-18 | 0.009 | 0.032 | 0.014 | | | 0.003 | 0.016 | <0.001 |
| CHLa-20 = CHLb-8 | — | — | — | — | — | — | — | — |
| CHLa-21 | | | | nd | nd | nd | nd | nd |
| CHLa-22 | 0.004 | 0.016 | 0.001 | | | | E0.016(G) | E0.026(G) |
| CHLa-23 | 0.009 | 0.032 | 0.022 | | | 0.001 | 0.004 | <0.001 |
| CHLa-24 = CHLb-1 | 0.009 | 0.032 | 0.008 | | | 0.008 | 0.048 | 0.001 |
| CHLa-25 = CHLb-10 | | | | | | | | |
| CHLa-26 | 0.004 | 0.016 | 0.008 | | | 0.005 | 0.028 | <0.001 |
| CHLa-27 | 0.004 | 0.016 | 0.002 | | | 0.0013 | 0.048 | 0.001 |
| CHLa-29 | 0.004 | 0.016 | 0.002 | | | 0.003 | 0.016 | <0.001 |
| CHLa-30 | | | 0.051 | nd | nd | nd | nd | nd |
| CHEa-1 = CHEb-3 | — | — | — | — | — | — | — | — |
| CHEa-2 | | | | nd | nd | nd | nd | nd |
| CHEa-3 | — | — | — | — | — | — | — | — |
| CHEa-4 | 0.052(G) | | 0.014(G) | | | | | |
| CHEa-6 | 0.052(G) | 0.063(G) | 0.035(G) | nd | nd | nd | nd | nd |
| LCL-1 | nd | nd | nd | | | nd | nd | nd |
| LCL-3 | nd | nd | nd | | | nd | nd | nd |
| LCL-5 | nd | nd | nd | | | nd | nd | nd |
| LCE-2 | nd | nd | nd | | | nd | nd | nd |
| LCE-3 | nd | nd | nd | | | nd | nd | nd |
| LCE-4 | nd | nd | nd | | | nd | nd | nd |
| LCE-5 | nd | nd | nd | | | nd | nd | nd |
| LCE-7 | nd | nd | nd | | | nd | nd | nd |
| LCE-8 | nd | nd | nd | | | nd | nd | nd |
| CHLb-1 | | | | nd | nd | nd | nd | nd |
| CHLb-2 | 0.017 | 0.016 | 0.003 | nd | nd | nd | nd | nd |
| CHLb-3 | 0.004 | 0.016 | 0.03 | nd | nd | nd | nd | nd |
| CHLb-4 | 0.017 | 0.032 | 0.01 | nd | nd | nd | nd | nd |
| CHLb-5 | 0.017 | 0.032 | 0.03 | nd | nd | nd | nd | nd |
| CHLb-11 | | | | | | | | |
| CHEb-2 | — | — | — | — | — | — | — | — |
| CHEb-4 | | | | nd | nd | nd | nd | nd |
| CHEb-5 | — | — | — | — | — | — | — | — |
| CHEb-7 | — | — | — | — | — | — | — | — |

Selections between the early recurrent group and the late recurrent group are indicated as maximum and minimum numbers of months before recurrence and the numbers of cases are shown in parentheses. The two groups were compared by Mann Whitney U test, where P values that were significant (P < 0.05) or that tended to be significant (0.05 < P < 0.07) are shown.
—: Unmeasurable.
nd: Not determined.
Blank: no significance.
E: Increased expression in early recurrent group.
(G): Difference in expression levels upon normalization with GAPDH gene.
For CHLa-1, CHLa-25, CHLb-11, LC comparison was conducted in 5:3, 11:3,
LCE:CHL comparison was conducted in 5:6, 5:4 and 11:6.
Two-group comparison between chronic hepatitis and liver cirrhosis were classified into five categories shown in the figure.

[0143] For the recurrence-related gene, most of the chronic hepatitis late genes detected on the microarray were able to be verified by real-time PCR (CHL). The recurrence-related genes detected in chronic hepatitis also gave the same results for both early groups where recurrence following surgery was set to be within about a year or about two years. The same results were obtained when recurrence of the late recurrent group was set to be about three years or longer or about five years or longer after the surgery.

[0144] For a part of the recurrence-related genes in chronic hepatitis, expression in the liver cirrhosis cases were determined by real-time PCR. The results are shown in parentheses in FIG. 9. The verification results shown in FIG. 9 indicate two-group comparison between the liver cirrhosis early recurrent group and the chronic hepatitis late recurrent group. Results are also shown under “liver cirrhosis” and “LC early: CH late” in Table 10.

[0145] From the results above, the recurrence-related genes detected in chronic hepatitis did not show significant difference in expressions between the early recurrent group and the late recurrent group of the liver cirrhosis cases (CH genes are indicated as blank in the column under “Liver cirrhosis” in Table 10). Accordingly, the recurrence-related genes of the chronic hepatitis cases were shown to be different from the recurrence-related genes of the liver cirrhosis cases. Most of the chronic hepatitis late recurrent gene, however, showed low expression not only for the chronic hepatitis early group but also for the early recurrent group of the liver cirrhosis cases (18 CHLa genes showed significance difference as indicated in the column under “LC early: CH late” in Table 10). Thus, these genes seem to show low expressions commonly in the early recurrent cases of both chronic hepatitis and liver cirrhosis. Recurrence may be prevented if expressions of these genes can be enhanced. These genes are evocative in terms of preventing recurrence.

### Comparative Example

### Extraction of Recurrence-Related Gene Candidates

[0146] Recurrence-related genes were searched for 20 hepatocellular carcinoma cases using 20 microarrays without classifying the hepatocellular carcinoma cases by the presence of liver cirrhosis.

[0147] 31020 probes exhibited P flags (expression) on at least one of the 20 microarrays, and the number of probes were limited to about 1000 to 2000 probes when genes having significantly fluctuating expression levels due to difference in the recurrence difficulty (10:10) were determined by four different statistical procedures. 905 probes were positive in these analyses in common. 140 probes had fluctuating expression levels that were at least twice as different between the two groups, and only 3 probes could be selected as probes that displayed P flags on all of the microarrays of higher expressions.

[0148] Accordingly, it may be important to perform screening for recurrence-related gene while classifying hepatocellular carcinoma cases by the presence or absence of liver cirrhosis.

[0149] In the following example, noncancerous sites from 64 cases of hepatocellular carcinoma type C and noncancerous liver sites from 13 cases of hepatic metastasis of colorectal cancer as normal hepatic tissues were used as targets. The resected noncancerous liver sites from hepatitis viral marker-negative hepatic metastasis of colorectal cancer was assumed to be normal liver since no histopathologic inflammation was seen.

[0150] The hepatocellular carcinoma type C cases were classified by number of months without recurrence, and were classified into chronic hepatitis cases and liver cirrhosis cases according to pathological tissue images of the noncancerous sites (Table 11 and FIG. 10). Table 11 and FIG. 10 show three approaches for classifying the two groups, i.e., the early and late recurrent groups. In FIG. 10, ♦ represents cases selected as the early recurrent group, and shaded ∘ represent cases selected as the late recurrent groups. A represents cases that were selected as neither of the two groups. The shaded ∘ represents the late recurrent cases with number of months confirmed without recurrence.

TABLE 11
77 Cases Used for Real-Time PCR
Classification by the number of months before recurrence for 64
cases of hepatocellular carcinoma type C and 13 cases of normal liver

| Months without | No. | | | 13 | 13 | 24 |
|---|---|---|---|---|---|---|
| recurrence^{a} | CH^{b} | LC^{b} | NL^{b} | M:37 M^{c} | M:65 M^{c} | M:37 M^{c} |
| >94 | 1 | | | Late | Late | Late |
| 75 | 1 | | | Late | Late | Late |
| >71 | 1 | | | Late | Late | Late |
| >70 | 1 | 1 | | Late | Late | Late |
| 70 | 1 | | | Late | Late | Late |
| 65 | 1 | | | Late | Late | Late |
| 64 | | 1 | | Late | | Late |
| >61 | 2 | | | Late | | Late |
| >58 | | 1 | | Late | | Late |
| 58 | | 1 | | Late | | Late |
| >57 | 1 | | | Late | | Late |
| >55 | 1 | | | Late | | Late |
| 48 | | 1 | | Late | | Late |
| 47 | | 1 | | Late | | Late |
| >44 | 1 | | | Late | | Late |
| >43 | 1 | | | Late | | Late |
| 43 | | 1 | | Late | | Late |
| 41 | 1 | | | Late | | Late |
| >40 | 1 | | | Late | | Late |
| >39 | | 1 | | Late | | Late |
| 38 | | 1 | | Late | | Late |
| >37 | 1 | | | Late | | Late |
| 37 | | 2 | | Late | | Late |
| 35 | 1 | | | | | |
| >34 | 1 | | | | | |
| 34 | 1 | | | | | |
| 33 | 1 | | | | | |
| 30 | | 1 | | | | |
| 28 | | 1 | | | | |
| 27 | | 1 | | | | |
| 26 | | 1 | | | | |
| 25 | | 1 | | | | |
| 24 | 1 | | | | | Early |
| 23 | 1 | | | | | Early |
| 22 | | 1 | | | | Early |
| 21 | | 1 | | | | Early |
| 20 | 1 | | | | | Early |
| 17 | | 1 | | | | Early |
| 16 | | 1 | | | | Early |
| 15 | | 1 | | | | Early |
| 14 | 2 | | | | | Early |
| 13 | 2 | | | Early | Early | Early |
| 12 | | 2 | | Early | Early | Early |
| 10 | | 3 | | Early | Early | Early |
| 9 | 1 | 2 | | Early | Early | Early |
| 8 | | 1 | | Early | Early | Early |
| 7 | | 2 | | Early | Early | Early |
| 6 | 1 | 2 | | Early | Early | Early |
| 4 | | 2 | | Early | Early | Early |
| 3 | | 1 | | Early | Early | Early |
| Total | 28 | 36 | 13 | | | |

^{a}“Months without recurrence” include the number of months without recurrence upon investigation as well as the number of months before recurrence.
^{b}Classification into chronic hepatitis (CH) and liver cirrhosis (LC) was made according to degrees of fibrosis in noncancerous sites of hepatocellular carcinoma type C cases. As normal liver (NL), a noncancerous liver site from a liver metastatic case of colorectal cancer was used.
^{c}Selections between the early recurrent group and the late recurrent group are indicated as maximum and minimum numbers of months before recurrence.

### Example 9

### Determination of Endogenous Control Gene

[0151] According to this example, genes at a certain level in the liver were examined in order to determine an endogenous control gene more appropriate for verifying the gene of the present invention.

[0152] In order to select genes whose expressions do not fluctuate by histopathological differences in the liver, 8, 8 and 10 cases were selected from cases of chronic hepatitis, liver cirrhosis and normal liver, respectively as the targets of the present example. Qualities of total RNAs were confirmed with Agilent Bioanalyzer 2100, and cases that indicate RNA integrity numbers of 7 or higher were selected as the target cases.

[0153] Table 12 shows 12 genes that were used as housekeeping genes, and expression levels of liver-derived RNAs from 26 cases were examined by real-time PCR. Primers for 14 genes are shown in Table 13. Quantification by real-time PCR was performed by an absolute quantification method by preparing a standard curve by a dilution series of standard samples for quantification in a manner similar to Example 8. Liver cDNAs that showed the highest expression in each gene were used as the standard samples, and the amount (ng) of the cDNA were used as quantitative values. For each gene, a relative expression level was determined assuming the median of the expression levels from 26 cases as 1 to compare the expression level distributions of the 26 cases between the genes. In liver RNAs from the 26 cases, genes having constant expression levels were examined.

TABLE 12

| Gene | Gene title |
|---|---|
| GAPDH | Glyceraldehyde-3-phosphate dehydrogenase |
| 18S r RNA | 18S ribosomal RNA |
| GUSB | Glucuronidase, beta |
| TBP | TATA box binding protein |
| ALAS1 | Aminolevulinate, delta-, synthase 1 |
| HPRT1 | Hypoxanthine phosphoribosyl transferase 1 |
| b2M | Beta-2 microglobulin |
| SDHA | Succinate dehydrogenase complex, subunit A |
| YWHAZ | Tyrosine 3-monooxygenase/tryptophan 5-monooxygenase |
| | activation protein, zeta polypeptide |
| MBD4 | Methyl-CpG binding domain protein 4 |
| SMARCA5 | WI/SNF related, matrix associated, actin dependent |
| | regulator of chromatin, subfamily a, member 5 |
| GMFG | Glia maturation factor, gamma |

[0154] FIGS. 11A and 11B show results of expression level distributions of the endogenous control gene candidates. FIGS. 11A and 11B show expression level distributions of the genes separately for chronic hepatitis, liver cirrhosis, and normal liver by determining natural logarithms of relative expression levels. ⋄ represents the early recurrent group (recurrence within two years), ∘ represents the late recurrent group (without recurrence for three years or longer), Δ represents cases that were selected as neither of the two groups. □ represents normal liver (histopathologically normal in a noncancerous site tissue in terms of colorectal cancer).

[0155] Among the 12 genes, 3 genes 18s rRNA, GUSB and GAPDH were the genes that showed with the smallest changes in the expression levels. In other genes such as TBP, gene expressions were varied, for example, in liver cirrhosis cases. Moreover, there were genes such as ALAS1 and HPRT1 whose expressions greatly fluctuated in general.

[0156] According to this example, 18s rRNA, GUSB and GAPDH were shown to be appropriate as endogenous control genes used in the present invention.

### Example 10

### Verification of Expression Quantification and Two-Group Comparison by Real-Time PCR

[0157] According to this example, significance tests were performed with various pairs of groups of early and late recurrences by real-time PCR for expressions of 43 genes among the genes selected in Examples 2-4. Table 13 shows primer sequences used. Tables 14, 15 and 16 show the results from the tests using the three genes selected in Example 9 as endogenous control genes, respectively, i.e., 18s rRNA, GUSB and GAPDH.

TABLE 13
Primer Sequences used for Real-Time PCR using 77 cases

| | Primer sequence | | | | |
|---|---|---|---|---|---|
| Gene | Forward (5′-3′) | SEQ ID NO: | Reverse (5′-3′) | SEQ ID NO: | Annealing |

GeneChip

| | | | | | |
|---|---|---|---|---|---|
| CHLa-1 | agcccaacatcaaagacacc | 116 | gctcagctctgggatgatgt | 117 | 60 |
| CHLa-2 | agcatcttcggttggtgttc | 118 | ctacggccagcattagcttc | 119 | 60 |
| CHLa-3 = LCE-1 | atggccgcacaatagaactc | 120 | tgtcccgtagcaccttctgt | 121 | 65 |
| CHLa-4 | tggatcgaatccaaacacaa | 122 | ctggcttgtctgcaaacctt | 123 | 60 |
| CHLa-5 | cccgacataccttcggacta | 124 | ctgtgaagccaagatgcaga | 125 | 60 |
| CHLa-6 | gacggcagagaggatcaca | 126 | catcaaaagccacgtcttca | 127 | 60 |
| CHLa-7 | ctgcaacgacatgggtaaga | 128 | ctgggcttcgtaggacttga | 129 | 60 |
| CHLa-8 | gatcatccctgtacgctgct | 130 | agcagcttctcgatcaggtc | 131 | 65 |
| CHLa-9 | tgctggggataggaattctg | 132 | cattgcgacactccatcact | 133 | 60 |
| CHLa-10 | tcagcaagatctgcgtgaac | 134 | ggggcaggtccttctctatc | 135 | 60 |
| CHLa-11 | ccggactacatgaacctgct | 136 | gcagagatggacagcatgaa | 137 | 60 |
| CHLa-12 | cctccgaatggtacctgaaa | 138 | ttcatagttggccaccacaa | 139 | 60 |
| CHLa-13 | agtgactcggcaggagaaga | 140 | cttggagctcatgggtgact | 141 | 60 |
| | gccttgaccgcaagatagag | 232 | gccagctcctcgtagucac | 233 | 60 |
| CHLa-14 | cgagctgcactcctacctct | 142 | gccatgtacttgtcgtgctt | 143 | 60 |
| CHLa-15 | gggcgagggaatagtcagag | 144 | aatcctcgtcttgtcgttgg | 145 | 60 |
| CHLa-18 | ctgccagggtttgtggag | 148 | gagccgaaccttgccttc | 149 | 60 |
| CHLa-21 | ccgtcatctgggtgactttt | 152 | aacaaccggacgtcatctgt | 153 | 60 |
| CHLa-22 | ccagctggtggtgctgtt | 154 | cttggtgcctggaaggatg | 155 | 60 |
| CHLa-23 | aacccttgggatggaaaatc | 156 | tggtcaggtgcgtgtaggta | 157 | 60 |
| CHLa-24 = CHLb-16 | gggcccatcgactacaaac | 158 | gctcacggttccacttcatt | 159 | 60 |
| CHLa-25 = CHLb-10 | gacgtgcagaaatggcacct | 160 | cagtcacacggcagatggtt | 161 | 60 |
| CHLa-26 | ggcctgtttgatgtggtcat | 162 | cggtcctttgagctttcttg | 163 | 60 |
| CHLa-27 | cagcaaattgccacagagaa | 164 | ggaacaggagcacgactagg | 165 | 60 |
| CHLa-29 | caaccacgagggatccag | 166 | caagtctctgccccatccta | 167 | 60 |
| CHLa-30 | tgcctcgaaccctcatactc | 168 | tgtccacatactccgtccag | 169 | 60 |
| CHEa-2 | ggtgtcagagccagttgtca | 172 | aaatttccacatcggcagtc | 173 | 60 |
| CHEa-4 | caatgtgaccttctgtgtgct | 176 | cgcactatgtcgatgtcgtt | 177 | 60 |
| CHEa-6 | aaaaccctgtgccttacacaa | 178 | gaggctgtgtctcaatcacct | 179 | 60 |
| LCL-1 | atgccggtgacacaacagta | 180 | gacgaacatcaattccagca | 181 | 60 |
| LCL-3 | tgggtatttgtggcaattca | 184 | tggcatatgacccaactgac | 185 | 60 |
| LCL-5 | ttgcagtgatttgcttttgc | 188 | gccacagcatctgggtattt | 189 | 60 |
| LCE-2 | agcggtacaggtgagcagag | 198 | gggctccttcctgttactga | 199 | 60 |
| LCE-3 | acacctgctgggctgtaaac | 200 | gacagaaaaggttggctgga | 201 | 60 |
| LCE-4 | tccaaggtggagaggtgttc | 202 | tgtgtgactctcacgccact | 203 | 60 |
| LCE-5 | gcctgtaagtacggggacaa | 204 | ctcttcagcgttgtggatga | 205 | 60 |
| LCE-7 | cagtgtgaccttttctgaggtg | 208 | caatgcaattctccttggcta | 209 | 60 |
| LCE-8 | gggcatgaaatgaagacacc | 210 | aggaagttcacagccacctg | 211 | 60 |
| CHLb-1 | acagagcctcgcctttgc | 212 | cacgatggaggggaagac | 213 | 60 |
| CHLb-2 | ccgaatcagtacctccctca | 214 | gaatcccctggaggctaatg | 215 | 60 |
| CHLb-3 | gcaggtaaacgtgctgctct | 216 | ctccaactgaaggtccctga | 217 | 60 |
| CHLb-4 | ggaagtcgaggacgagagtg | 218 | acttgtcccgtcatttcctg | 219 | 60 |
| CHLb-5 | tgagctccctggtgtctctc | 220 | cacatcaggctcacgttgat | 221 | 60 |
| CHLb-11 | gtgtacgagtcggccaagtt | 222 | ggatgagcgtgaagtggatt | 223 | 60 |

Control

| | | | | | |
|---|---|---|---|---|---|
| 18S rRNA | aaacggctaccacatccaag | 234 | cctccaatggatcctcgtta | 235 | 65 |
| GAPDH | ggtcggagtcaacggatttg | 236 | ggatctcgctcctggaagat | 237 | 60 |
| GUSB | ttcagagcgagtatggagca | 238 | ctctcgtcggtgactgttca | 239 | 60 |
| TBP | ccacagctcttccactcaca | 240 | gcggtacaatcccagaactc | 241 | 60 |
| ALAS1 | gagcaatcaccttcgtggat | 242 | ccagcagcataggaccgta | 243 | 60 |
| HPRT1 | tggcgtcgtgattagtgatg | 244 | gcacacagagggctacaatg | 245 | 60 |
| b2M | ggtttcatccatccgacatt | 246 | acggcaggcatactcatctt | 247 | 60 |
| SDHA | cctggcatttcagagacagc | 248 | acctgccccttgtagttggt | 249 | 60 |
| YWHAZ | ccaaggagacgaagctgaag | 250 | tatttgtgggacagcatgga | 251 | 60 |
| MBD4 | aacgtggctctgaaatggac | 252 | tctgtgttcgtgggatggta | 253 | 60 |
| SMARCA5 | ccgaggattaaactggctca | 254 | gaggcccaggaatgtttcta | 255 | 60 |
| GMFG | gtctgactccctggtggtgt | 256 | cggtctttgtccaccttcat | 257 | 60 |

Overlap genes are shown together and linked with =

TABLE 14
Quantitative Analysis and Two-Group Comparison by Real-time PCR (normalized with 18S rRNA)

| | Chronic hepatitis | | | CH:Normal liver | | Liver cirrhosis | | LC early:CH late | | |
|---|---|---|---|---|---|---|---|---|---|---|
| | 13 | 13 | 24 | 24 | 37 | 12 | 24 | 13 | 13 | 24 |
| | M:37 M | M:65 M | M:37 M | M:NL | M:NL | M:37 M | M:37 M | M:37 M | M:65 M | M:37 M |
| No. | (4:15) | (4:6) | (9:15) | (9:13) | (15:13) | (15:11) | (20:11) | (15:15) | (6:15) | (15:20) |
| CHLa-1 | | | | | | | | | | |
| CHLa-2 | 0.027 | 0.038 | 0.001 | | 0.037 | | | | | 0.039 |
| CHLa-3 = LCE-1 | | | | | | | | | | |
| CHLa-4 | 0.009 | 0.010 | 0.012 | | | | | | | 0.017 |
| CHLa-5 | 0.001 | 0.019 | 0.003 | 0.036 | | | | | | 0.069 |
| CHLa-6 | 0.009 | 0.010 | 0.015 | 0.009 | | | | 0.061 | | 0.014 |
| CHLa-7 | 0.001 | 0.010 | 0.010 | 0.001 | | | | | | |
| CHLa-8 | 0.001 | 0.010 | 0.007 | 0.002 | | | | | | |
| CHLa-9 | | | 0.015 | | 0.003 | | | | | |
| CHLa-10 | 0.001 | 0.019 | <0.001 | <0.001 | 0.003 | | | 0.007 | | 0.001 |
| CHLa-11 | 0.001 | 0.019 | <0.001 | <0.001 | | | | | | 0.030 |
| CHLa-12 | 0.037 | | 0.003 | 0.001 | | | | | | |
| CHLa-13 | | | 0.012 | 0.014 | | | | | | |
| CHLa-14 | 0.009 | 0.019 | 0.005 | 0.007 | | | | | | 0.033 |
| CHLa-15 | 0.001 | 0.010 | 0.003 | <0.001 | | | | | | 0.050 |
| CHLa-18 | | | 0.064 | 0.036 | | | | | | |
| CHLa-21 | 0.027 | | 0.007 | 0.007 | | | | | | |
| CHLa-22 | 0.002 | 0.019 | <0.001 | 0.043 | | | | 0.033 | | 0.007 |
| CHLa-23 | 0.037 | | 0.005 | 0.001 | | | 0.060 | 0.019 | 0.066 | 0.003 |
| CHLa-24 = | 0.006 | 0.038 | 0.015 | 0.009 | | | | | | 0.050 |
| CHLb-16 | | | | | | | | | | |
| CHLa-25 = | 0.006 | 0.010 | 0.004 | 0.009 | | | | | | |
| CHLb-10 | | | | | | | | | | |
| CHLa-26 | | | 0.035 | | 0.029 | | | | | |
| CHLa-27 | 0.009 | 0.038 | 0.003 | <0.001 | 0.058 | | 0.020 | 0.015 | | 0.001 |
| CHLa-29 | 0.001 | 0.010 | 0.002 | 0.003 | | | | 0.033 | | 0.025 |
| CHLa-30 | 0.020 | 0.067 | 0.005 | 0.025 | | | | | | 0.039 |
| CHEa-2 | | | | 0.001 | 0.033 | | | | | |
| CHEa-4 | | | | | | | | | | |
| CHEa-6 | | | | | | | | | | |
| LCL-1 | | | | 0.003 | 0.003 | | | 0.004 | 0.002 | <0.001 |
| LCL-3 | | | | | 0.001 | 0.054 | 0.029 | 0.004 | 0.008 | 0.001 |
| LCL-5 | | | | | | | | | | |
| LCE-2 | | | 0.021 | <0.001 | 0.003 | | | <0.001 | 0.008 | <0.001 |
| LCE-3 | 0.049 | | 0.021 | <0.001 | 0.001 | | | | | |
| LCE-4 | 0.049 | 0.038 | 0.064 | | | | | | | |
| LCE-5 | 0.020 | 0.038 | 0.018 | 0.011 | | | 0.036 | 0.067 | | 0.006 |
| LCE-7 | | | | | | | | | | |
| LCE-8 | | | | 0.003 | 0.041 | | | | | |
| CHLb-1 | 0.020 | 0.038 | 0.012 | 0.001 | | | | | | |
| CHLb-2 | | | 0.008 | 0.007 | | | | | 0.066 | |
| CHLb-3 | 0.049 | | | | 0.033 | | | | | |
| CHLb-4 | 0.027 | 0.038 | 0.003 | | | | | 0.001 | 0.014 | 0.001 |
| CHLb-5 | 0.004 | 0.010 | 0.001 | <0.001 | 0.033 | | | | | 0.033 |
| CHLb-11 | | | 0.064 | 0.004 | | | | | | |

Selections between the early recurrent group and the late recurrent group are indicated as maximum and minimum numbers of months before recurrence and the numbers of cases are shown in parentheses. The two groups were compared by Mann Whitney U test, where P values that were significant (P < 0.05) or that tended to be significant (0.05 < P < 0.07) are shown.
Blank: no significance.

[0158] From the verification results in Table 14, some genes found in liver cirrhosis (SEQ ID NO: 98-115) were found usable for examining recurrence of hepatocellular carcinoma associated with chronic hepatitis (LCE-2, 3, 4 and 5 (SEQ ID NOS: 109-111) in Table 6). In addition, some genes found in chronic hepatitis (SEQ ID NOS: 1-98) were found usable for examining recurrence of hepatocellular carcinoma associated with liver cirrhosis (CHLa-23,27(SEQ ID NO: 25, 29)).

TABLE 15
Quantitative Analysis and Two-Group Comparison by Real-time PCR (normalized with GAPDH)

| | Chronic hepatitis | | | CH:Normal liver | | Liver cirrhosis | | LC early:CH late | | |
|---|---|---|---|---|---|---|---|---|---|---|
| | | 13 | 24 | | | | 24 | 13 | 13 | 24 |
| | 13 | M:65 M | M:37 M | 24 M:NL | 37 M:NL | 12 | M:37 M | M:37 M | M:65 M | M:37 M |
| No. | M:37 M | (4:6) | (9:15) | (9:13) | (15:13) | M:37 M | (20:11) | (15:15) | (6:15) | (15:20) |
| CHLa-1 | | | | 0.060 | | | | | | |
| CHLa-2 | | | | <0.001 | 0.002 | | | | | |
| CHLa-3 = LCE-1 | | | | | | | | | | |
| CHLa-4 | | | | 0.001 | 0.004 | | | | 0.029B | |
| CHLa-5 | | | | 0.001 | 0.013 | | 0.036E | | | |
| CHLa-6 | | | | 0.001 | | | | | 0.036E | |
| CHLa-7 | | | | | | | | | | 0.050E |
| CHLa-8 | | | | | | | | | | |
| CHLa-9 | | | | <0.001 | <0.001 | | | | | |
| CHLa-10 | | | | 0.011 | 0.006 | | | | | |
| CHLa-11 | | | | | | | | | | |
| CHLa-12 | | | | | | | | | | |
| CHLa-13 | | | 0.055E | 0.007 | | | | | | |
| CHLa-14 | | | 0.055E | 0.043 | | | | | | |
| CHLa-15 | | | | | | | | | | |
| CHLa-18 | | | 0.064E | 0.003 | | | | | | |
| CHLa-21 | | | | | | | | 0.023E | | 0.004E |
| CHLa-22 | | | | | | | | | | |
| CHLa-23 | | | | | | | | | | |
| CHLa-24 = | | | | 0.003 | | | | | | |
| CHLb-16 | | | | | | | | | | |
| CHLa-25 = | | | | 0.017 | | | | | | |
| CHLb-10 | | | | | | | | | | |
| CHLa-26 | | | | 0.001 | | | | | | |
| CHLa-27 | | | | <0.001 | 0.001 | 0.004 | 0.002 | <0.001 | 0.036 | <0.001 |
| CHLa-29 | | | | 0.011 | | | | | | |
| CHLa-30 | | | | | 0.058 | | | | | |
| CHEa-2 | | | | | 0.046 | | | | | |
| CHEa-4 | 0.014E | 0.019E | 0.015E | 0.011 | | | | | | |
| CHEa-6 | 0.0036E | 0.019E | 0.001E | 0.003 | | | | | | |
| LCL-1 | 0.027E | | | | | | | | 0.055E | |
| LCL-3 | 0.020E | | 0.055E | <0.001 | <0.001 | | | | 0.066E | |
| LCL-5 | | | | | | | | 0.015E | | 0.002E |
| LCE-2 | | | | | | | | 0.002 | 0.014 | <0.001 |
| LCE-3 | | | | 0.007 | <0.001 | | | | | 0.013E |
| LCE-4 | | | | 0.001 | | | | | | |
| LCE-5 | | | | | | | 0.054 | 0.001 | 0.003 | <0.001 |
| LCE-7 | | | | 0.014 | | | | 0.033E | 0.045E | 0.030E |
| LCE-8 | 0.006E | 0.010E | 0.048E | | | | | | | |
| CHLb-1 | | | | | | | | | | |
| CHLb-2 | | | | | | | | | | |
| CHLb-3 | | | | 0.004 | | | | | | |
| CHLb-4 | | | | | 0.008 | | | 0.002 | 0.008 | 0.006 |
| CHLb-5 | | | | 0.017 | | | | | 0.055 | |
| CHLb-11 | | | | | | | | | | |
| GAPDH | 0.004 | 0.010 | 0.002 | <0.001 | | | | | | 0.069 |

Selections between the early recurrent group and the late recurrent group are indicated as maximum and minimum numbers of months before recurrence and the numbers of cases are shown in parentheses. The two groups were compared by Mann Whitney U test, where P values that were significant (P < 0.05) or that tended to be significant (0.05 < P < 0.07) are shown.
Blank: no significance.
E: Increased expression in early recurrent group.
Significant difference where the expression level of GAPDH normalized with 18S rRNA was decreased in the early recurrent group was observed in part of the comparison.

TABLE 16
Quantitative Analysis and Two-Group Comparison by Real-time PCR (normalized with GUSB)

| | Chronic hepatitis | | | CH:Normal liver | | Liver cirrhosis | | LC early:CH late | | |
|---|---|---|---|---|---|---|---|---|---|---|
| | | 13 | 24 | | | | 24 | 13 | 13 | 24 |
| | 13 | M:65 M | M:37 M | 24 M:NL | 37 M:NL | 12 | M:37 M | M:37 M | M:65 M | M:37 M |
| No. | M:37 M | (4:6) | (9:15) | (9:13) | (15:13) | M:37 M | (20:11) | (15:15) | (6:15) | (15:20) |
| CHLa-1 | | | | | | | | | | |
| CHLa-2 | | | | 0.030 | 0.011 | | | | | |
| CHLa-3 = LCE-1 | | | | | | | | | | |
| CHLa-4 | | | | | 0.025 | | | | | 0.039 |
| CHLa-5 | 0.020 | | | | 0.010 | | | | | |
| CHLa-6 | | | | | | | | | | |
| CHLa-7 | 0.009 | 0.038 | 0.055 | 0.003 | | | | | | |
| CHLa-8 | 0.014 | | | | | | | | | |
| CHLa-9 | | | | 0.003 | <0.001 | | | | | |
| CHLa-10 | 0.006 | 0.019 | 0.001 | <0.001 | 0.001 | | | | | |
| CHLa-11 | 0.062 | | | 0.060 | | | | | | |
| CHLa-12 | | | | | | | | | | |
| CHLa-13 | | | | | | | | | | |
| CHLa-14 | | | | | | | | | | |
| CHLa-15 | | | | | | | | | | |
| CHLa-18 | | | | | | | | | | |
| CHLa-21 | | | | | | | | | | |
| CHLa-22 | | | | | | | | | | |
| CHLa-23 | | | | | | | | | | |
| CHLa-24 = | | | | | | | | | | |
| CHLb-16 | | | | | | | | | | |
| CHLa-25 = | 0.062 | | | | | | | | | |
| CHLb-10 | | | | | | | | | | |
| CHLa-26 | | | | 0.011 | | | | | | |
| CHLa-27 | 0.049 | | 0.035 | <0.001 | 0.029 | 0.054 | 0.018 | 0.013 | | 0.003 |
| CHLa-29 | | | | | | | | | | |
| CHLa-30 | | | | | | | | | | |
| CHEa-2 | | | | 0.017 | 0.025 | | | | | |
| CHEa-4 | | | | 0.025 | | | | | | |
| CHEa-6 | 0.037E | 0.038E | 0.010E | 0.043 | | | | | | |
| LCL-1 | | | | | 0.015 | | | | | |
| LCL-3 | | | | 0.001 | 0.001 | | | | | |
| LCL-5 | | | | | | | | 0.033E | | 0.012E |
| LCE-2 | | | | 0.011 | 0.011 | | | <0.001 | 0.014 | <0.001 |
| LCE-3 | | | | 0.001 | 0.002 | | | | | |
| LCE-4 | | | | | | | | | | |
| LCE-5 | | | 0.064 | 0.060 | | | 0.060 | 0.010 | | 0.001 |
| LCE-7 | | | | | | | | 0.056 | 0.036 | |
| LCE-8 | | | | | 0.037 | | | | | |
| CHLb-1 | 0.062 | | | 0.001 | | | | | | |
| CHLb-2 | | | | | | | | | | |
| CHLb-3 | | | | 0.021 | 0.029 | | | | | |
| CHLb-4 | | | | | 0.065 | | | 0.005 | 0.011 | 0.004 |
| CHLb-5 | 0.020 | 0.019 | 0.005 | <0.001 | | | | | | |
| CHLb-11 | | | | 0.036 | | | | | | |
| GUSB | 0.049 | | 0.025 | 0.009 | | | | | | |

Selections between the early recurrent group and the late recurrent group are indicated as maximum and minimum numbers of months before recurrence end the numbers of cases are shown in parentheses. The two groups were compared by Mann Whitney U test, where P values that were significant (P < 0.05) or that tended to be significant (0.05 < P < 0.07) are shown.
Blank: no significance.
E: Increased expression in early recurrent group.
Significant difference in part of the comparison was observed as the expression level of GUSB normalized with 18S rRNA was decreased in the early recurrent group.

[0159] FIG. 12 shows typical expression patterns of genes that had fluctuating expression levels between the early recurrent group (recurrence within two years) and the late recurrent group (without recurrence for three years or longer). An expression level of 18S rRNA was used for normalization.

[0160] Among 18S rRNA, GAPDH and GUSB that were shown to be appropriate as endogenous controls in Example 9, 18S rRNA expressed at a constant level without increase or decrease in both of the late recurrent group and the early recurrent group. The number of verifiable genes was the highest when 18S rRNA was used as an endogenous control. Thus, 18S rRNA was shown to be most suitable as an endogenous control.

[0161] According to this example, 18S rRNA was shown to be most suitable as an endogenous control gene used for normalization.

[0162] In this example, many genes whose expressions were increased in the late recurrent group of hepatocellular carcinoma type C, in particular hepatocellular carcinoma type C associated with chronic hepatitis were verifiable. Most of the genes whose expressions were increased in the late recurrent group of hepatocellular carcinoma type C associated with chronic hepatitis were genes whose expressions were of the late recurrent group type (genes with significance difference for 24M:NL but no significance difference for 37M:NL where CH:Normal Liver in Table 14) or whose expression were increased higher than that (genes with significance difference for both of 24M:NL and 37M:NL where CH:Normal Liver in Table 14) in the normal liver. Accordingly, an expression manner similar to that of normal liver was shown to be a factor that delays recurrence. In other words, inhibiting an expression of a certain type of gene may possibly enhance the risk of recurrence.

[0163] According to this example, 3 recurrence-related genes in hepatocellular carcinoma type C associated with liver cirrhosis were verified, among which 2 genes (CHLa-27=DIAPH1, LCE-5=ZFP36L1) were common to genes verified as recurrence-related genes in hepatocellular carcinoma type C associated with chronic hepatitis. Thus, these 2 genes seem to be useful as genes common to predicting recurrence of hepatocellular carcinoma type C associated with chronic hepatitis as well as hepatocellular carcinoma type C associated with liver cirrhosis.

[0164] Furthermore, according to this example, expressions of 19 genes were shown to decrease in the early recurrent group (recurrence within 2 years) of liver cirrhosis as compared to the late recurrent group of chronic hepatitis. In other words, expressions of the 19 genes were increased in the chronic hepatitis late recurrent group as compared to the liver cirrhosis early recurrent group, among which expressions of 17 genes were also shown to be increased as compared to the chronic hepatitis early recurrent group. Thus, these 17 genes seem to be useful as genes for preventing recurrence of hepatocellular carcinoma type C.

[0165] Extraction of Combination of Genes for Predicting Recurrence

[0166] Combinations of genes for predicting recurrence were searched from the expression information of 43 genes. The chronic hepatitis cases were subjected to an analysis for distinguishing between the early recurrent group and the late recurrent group.

[0167] The target cases were (i) 24 cases from the late recurrent group and the early recurrent group of chronic hepatitis cases, (ii) 44 cases: all cases from the early recurrent group (chronic hepatitis cases and liver cirrhosis cases) and cases from the late recurrent group of chronic hepatitis cases, and (iii) all of the 55 cases from the early recurrent group and the late recurrent group.

[0168] Four to seven genes were extracted when genes effective for distinguishing between the early recurrent group (recurrence within two years) and the late recurrent group (without recurrence for more than three years) were extracted as discriminant functions (Table 17). Underlines indicate genes extracted in common to: (i) and (ii) and (iii); (i) and (ii); (i) and (iii); or (ii) and (iii). Accuracy of correct discrimination with each discriminant function is shown on the bottom in Table 17. Names of the genes are shown in parentheses in Table 17.

TABLE 17

| | CH:CH | All:CH | All:All |
|---|---|---|---|
| | No. (E:L) | | |
| | 9:15 | 29:15 | 29:26 |
| Step 1 | CHLa-10 | LCE-2 | CHEa-10 |
| | (GPX4) | (230456) | (GPX4) |
| Step 2 | CHLa-2 | CHLa-10 | CHEa-6 |
| | (LOC55908) | (GPX4) | (235419) |
| Step 3 | CHLa-23 | CHLb-1 | CHLb-2 |
| | (AKR7A2) | (ACTB) | (SLC28A1) |
| Step 4 | CHLb-2 | CHLa-29 | CHLa-12 |
| | (SLC28A1) | (FLJ14346) | (HPD) |
| Step 5 | — | CHLa-2 | CHLa-27 |
| | — | (LOC55908) | (DIAPH1) |
| Step 6 | — | CHLb-3 | CHLa-5 |
| | — | (ID1) | (UNQ501) |
| Step 7 | — | CHLa-5 | CHLa-29 |
| | — | (UNQ501) | (FLJ14346) |
| Accuracy (%) | 95.8 | 97.7 | 87.3 |

SEQUENCE LISTING
SEQ ID NOS: 116-257: primers

1. A method for screening a gene involved in early recurrence of HCV-positive hepatocellular carcinoma associated with chronic hepatitis, comprising:
determining an expression level of a gene in a noncancerous site from each of early and late recurrent cases of HCV-positive hepatocellular carcinoma associated with chronic hepatitis; and selecting a gene whose expression is increased in the early recurrent case compared with that in the late recurrent case.

2. A method for screening a gene involved in late recurrence of HCV-positive hepatocellular carcinoma associated with chronic hepatitis, comprising:
determining an expression level of a gene in a noncancerous site from each of early and late recurrent cases of HCV-positive hepatocellular carcinoma associated with chronic hepatitis; and selecting a gene whose expression is increased in the late recurrent case compared with that in the early recurrent case.

3. A method for screening a gene involved in early recurrence of HCV-positive hepatocellular carcinoma associated with liver cirrhosis, comprising:
determining an expression level of a gene in a noncancerous site from each of early and late recurrent cases of HCV-positive hepatocellular carcinoma associated with liver cirrhosis; and selecting a gene whose expression is increased in the early recurrent case compared with that in the late recurrent case.

4. A method for screening a gene involved in late recurrence of HCV-positive hepatocellular carcinoma associated with liver cirrhosis, comprising:
determining an expression level of a gene in a noncancerous site from each of early and late recurrent cases of HCV-positive hepatocellular carcinoma associated with liver cirrhosis; and selecting a gene whose expression is increased in the late recurrent case compared with that in the early recurrent case.

5. A microarray used for examining recurrence of HCV-positive hepatocellular carcinoma associated with chronic hepatitis, the microarray arranged with a probe for one or more genes selected from the group consisting of genes containing a nucleotide sequence represented by any of SEQ ID NOS: 1-115.

6. A microarray used for examining recurrence of HCV-positive hepatocellular carcinoma associated with liver cirrhosis, the microarray arranged with a probe for one or more genes selected from the group consisting of genes containing a nucleotide sequence represented by any of SEQ ID NO: 1-115.

The application's sequence listing, which the Patent Office published only in electronic form, follows.

SEQUENCE LISTING (257 sequences)

SEQ ID NO: 1 - DNA, 2322 bp, Homo sapiens
gggagggggtgggatgggtggggggtaacgggggaaactggggaagtggggaaccgaggggcaaccaggggaagatggggtgctggaggagagcttgtgggagccaaggagcaccttggacatctggagtctggcaggagtgatgacgggtggaggggctagctcgaggcagggctggtggggcctgaggccagtgaggagtgtggagtaggcgcccaggcatcgtgcagacagggcgacatcagctggggacgatgggcctgagctagggctggaaagaagggggagccaggcattcatcccggtcacttttggttacaggacgtggcagctggttggacgaggggagctggtgggcagggtttgatcccagggcctgggcaacggaggtgtagctggcagcagcgggcaggtgaggaccccatctgccgggcaggtgagtcccttccctccccaggcctcgcttccccagccttctgaaagaaggaggtttaggggatcgagggctggcggggagaagcagacaccctcccagcagaggggcaggatgggggcaggagagttagcaaaggtgacatcttctcggggggagccgagactgcgcaaggctggggggttatgggcccgttccaggcagaaagagcaagagggcagggagggagcacaggggtggccagcgtagggtccagcacgtggggtggtaccccaggcctgggtcagacagggacatggcaggggacacaggacagaggggtccccagctgccacctcacccaccgcaattcatttagtagcaggcacaggggcagctccggcacggctttctcaggcctatgccggagcctcgagggctggagagcgggaagacaggcagtgctcggggagttgcagcaggacgtcaccaggagggcgaagcggccacgggaggggggccccgggacattgcgcagcaaggaggctgcaggggctcggcctgcgggcgccggtcccacgaggcactgcggcccagggtctggtgcggagagggcccacagtggacttggtgacgctgtatgccctcaccgctcagcccctggggctggcttggcagacagtacagcatccaggggagtcaagggcatggggcgagaccagactaggcgaggcgggcggggcggagtgaatgagctctcaggagggaggatggtgcaggcaggggtgaggagcgcagcgggcggcgagcgggaggcactggcctccagagcccgtggccaaggcgggcctcgcgggcggcgacggagccgggatcggtgcctcagcgttcgggctggagacgaggccaggtctccagctggggtggacgtgcccaccagctgccgaaggccaagacgccaggtccggtggacgtgacaagcaggacatgacatggtccggtgtgacggcgaggacagaggaggcgcgtccggccttcctgaacaccttaggctggtggggctgcggcaagaagcgggtctgtttctttacttcctccacggagtcggcacactatggctgccctctgggctcccagaacccacaacatgaaagaaatggtgctacccagctcaagcctgggcctttgaatccggacacaaaaccctctagcttggaaatgaatatgctgcactttacaaccactgcactacctgactcaggaatcggctctggaaggtgaagctagaggaaccagacctcatcagcccaacatcaaagacaccatcggaacagcagcgcccgcagcacccaccccgcaccggcgactccatcttcatggccaccccctgcggcggacggttgaccaccagccaccacatcatcccagagctgagctcctccagcgggatgacgccgtccccaccacctccctcttcttctttttcatccttctgtctctttgtttctgagctttcctgtctttccttttttctgagagattcaaagcctccacgactctgtttcccccgtcccttctgaatttaatttgcactaagtcatttgcactggttggagttgtggagacggccttgagtctcagtacgagtgtgcgtgagtgtgagccaccttggcaagtgcctgtgcagggcccggccgccctccatctgggccgggtgactgggcgccggctgtgtgcccgaggcctcaccctgccctcgcctagtctggaagctccgaccgacatcacggagcagccttcaagcattccattacgccccatctcgctctgtgcccctccccaccagggcttcagcaggagccctggactcatcatcaataaacactgttacagcaaaaaaaaaaaaaaaa

SEQ ID NO: 2 - DNA, 2915 bp, Homo sapiens
ggctgtcctcccggtccgccccgcgctgcggttgctgctgggctaacgggctccgatccagcgagcgctgcgtcctcgagtccctgcgcccgtgcgtccgtctgcgacccgaggcctccgctgcgcgtggattctgctgcgaaccggagaccatggccaaaccagcacagggtgccaagtaccggggctccatccatgacttcccaggctttgaccccaaccaggatgccgaggctctgtacactgccatgaagggctttggcagtgacaaggaggccatactggacataatcacctcacggagcaacaggcagaggcaggaggtctgccagagctacaagtccctctacggcaaggacctcattgctgatttaaagtatgaattgacgggcaagtttgaacggttgattgtgggcctgatgaggccacctgcctattgtgatgccaaagaaattaaagatgccatctcgggcattggcactgatgagaagtgcctcattgagatcttggcttcccggaccaatgagcagatgcaccagctggtggcagcatacaaagatgcctacgagcgggacctggaggctgacatcatcggcgacacctctggccacttccagaagatgcttgtggtcctgctccagggaaccagggaggaggatgacgtagtgagcgaggacctggtacaacaggatgtccaggacctatacgaggcaggggaactgaaatggggaacagatgaagcccagttcatttacatcttgggaaatcgcagcaagcagcatcttcggttggtgttcgatgagtatctgaagaccacagggaagccgattgaagccagcatccgaggggagctgtctggggactttgagaagctaatgctggccgtagtgaagtgtatccggagcaccccggaatattttgctgaaaggctcttcaaggctatgaagggcctggggactcgggacaacaccctgatccgcatcatggtctcccgtagtgagttggacatgctcgacattcgggagatcttccggaccaagtatgagaagtccctctacagcatgatcaagaatgacacctctggcgagtacaagaagactctgctgaagctgtctgggggagatgatgatgctgctggccagttcttcccggaggcagcgcaggtggcctatcagatgtgggaacttagtgcagtggcccgagtagagctgaagggaactgtgcgcccagccaatgacttcaaccctgacgcagatgccaaagcgctgcggaaagccatgaagggactcgggactgacgaagacacaatcatcgatatcatcacgcaccgcagcaatgtccagcggcagcagatccggcagaccttcaagtctcactttggccgggacttaatgactgacctgaagtctgagatctctggagacctggcaaggctgattctggggctcatgatgccaccggcccattacgatgccaagcagttgaagaaggccatggagggagccggcacagatgaaaaggctcttattgaaatcctggccactcggaccaatgctgaaatccgggccatcaatgaggcctataaggaggactatcacaagtccctggaggatgctctgagctcagacacatctggccacttcaggaggatcctcatttctctggccacggggcatcgtgaggagggaggagaaaacctggaccaggcacgggaagatgcccaggtggctgctgagatcttggaaatagcagacacacctagtggagacaaaacttccttggagacacgtttcatgacgatcctgtgtacccggagctatccgcacctccggagagtcttccaggagttcatcaagatgaccaactatgacgtggagcacaccatcaagaaggagatgtctggggatgtcagggatgcatttgtggccattgttcaaagtgtcaagaacaagcctctcttctttgccgacaaactttacaaatccatgaagggtgctggcacagatgagaagactctgaccaggatcatggtatcccgcagtgagattgacctgctcaacatccggagggaattcattgagaaatatgacaagtctctccaccaagccattgagggtgacacctccggagacttcctgaaggccttgctggctctctgtggtggtgaggactagggccacagctttggcgggcacttctgccaagaaatggttatcagcaccagccgccatggccaagcctgattgttccagctccagagactaaggaaggggcaggggtggggggaggggttgggttgggctcttatcttcagtggagcttaggaaacgctcccactcccacgggccatcgagggcccagcacggctgagcggctgaaaaaccgtagccatagatcctgtccacctccactcccctctgaccctcaggctttcccagcttcctccccttgctacagcctctgccctggtttgggctatgtcagatccaaaaacatcctgaacctctgtctgtaaaatgagtagtgtctgtactttgaatgagggggttggtggcaggggccagttgaatgtgctgggcggggtggtgggaaggatagtaaatgtgctggggcaaactgacaaatcttcccatccatttcaccacccatctccatccaggccgcgctagagtactggaccaggaatttggatgcctgggttcaaatctgcatctgccatgcacttgtttctgaccttaggccagcccctttccctccctgagtctctattttcttatctacaatgagacagttggacaaaaaaatcttggcttcccttctaacattaacttcctaaagtatgcctccgattcattcccttgacactttttatttctaaggaagaaataaaaagagatacacaaacacataaacac

SEQ ID NO: 3 - DNA, 2897 bp, Homo sapiens
ggctgtcctcccggtccgccccgcgctgcggttgctgctgggctaacgggctccgatccagcgagcgctgcgtcctcgagtccctgcgcccgtgcgtccgtctgcgacccgaggcctccgctgcgcgtggattctgctgcgaaccggagaccatggccaaaccagcacagggtgccaagtaccggggctccatccatgacttcccaggctttgaccccaaccaggatgccgaggctctgtacactgccatgaagggctttggcagtgacaaggaggccatactggacataatcacctcacggagcaacaggcagaggcaggaggtctgccagagctacaagtccctctacggcaaggacctcattgctgatttaaagtatgaattgacgggcaagtttgaacggttgattgtgggcctgatgaggccacctgcctattgtgatgccaaagaaattaaagatgccatctcgggcattggcactgatgagaagtgcctcattgagatcttggcttcccggaccaatgagcagatgcaccagctggtggcagcatacaaagatgcctacgagcgggacctggaggctgacatcatcggcgacacctctggccacttccagaagatgcttgtggtcctgctccagggaaccagggaggaggatgacgtagtgagcgaggacctggtacaacaggatgtccaggacctatacgaggcaggggaactgaaatggggaacagatgaagcccagttcatttacatcttgggaaatcgcagcaagcagcatcttcggttggtgttcgatgagtatctgaagaccacagggaagccgattgaagccagcatccgaggggagctgtctggggactttgagaagctaatgctggccgtagtgaagtgtatccggagcaccccggaatattttgctgaaaggctcttcaaggctatgaagggcctggggactcgggacaacaccctgatccgcatcatggtctcccgtagtgagttggacatgctcgacattcgggagatcttccggaccaagtatgagaagtccctctacagcatgatcaagaatgacacctctggcgagtacaagaagactctgctgaagctgtctgggggagatgatgatgctgctggccagttcttcccggaggcagcgcaggtggcctatcagatgtgggaacttagtgcagtggcccgagtagagctgaagggaactgtgcgcccagccaatgacttcaaccctgacgcagatgccaaagcgctgcggaaagccatgaagggactcgggactgacgaagacacaatcatcgatatcatcacgcaccgcagcaatgtccagcggcagcagatccggcagaccttcaagtctcactttggccgggacttaatgactgacctgaagtctgagatctctggagacctggcaaggctgattctggggctcatgatgccaccggcccattacgatgccaagcagttgaagaaggccatggagggagccggcacagatgaaaaggctcttattgaaatcctggccactcggaccaatgctgaaatccgggccatcaatgaggcctataaggaggactatcacaagtccctggaggatgctctgagctcagacacatctggccacttcaggaggatcctcatttctctggccacggggcatcgtgaggagggaggagaaaacctggaccaggcacgggaagatgcccaggaaatagcagacacacctagtggagacaaaacttccttggagacacgtttcatgacgatcctgtgtacccggagctatccgcacctccggagagtcttccaggagttcatcaagatgaccaactatgacgtggagcacaccatcaagaaggagatgtctggggatgtcagggatgcatttgtggccattgttcaaagtgtcaagaacaagcctctcttctttgccgacaaactttacaaatccatgaagggtgctggcacagatgagaagactctgaccaggatcatggtatcccgcagtgagattgacctgctcaacatccggagggaattcattgagaaatatgacaagtctctccaccaagccattgagggtgacacctccggagacttcctgaaggccttgctggctctctgtggtggtgaggactagggccacagctttggcgggcacttctgccaagaaatggttatcagcaccagccgccatggccaagcctgattgttccagctccagagactaaggaaggggcaggggtggggggaggggttgggttgggctcttatcttcagtggagcttaggaaacgctcccactcccacgggccatcgagggcccagcacggctgagcggctgaaaaaccgtagccatagatcctgtccacctccactcccctctgaccctcaggctttcccagcttcctccccttgctacagcctctgccctggtttgggctatgtcagatccaaaaacatcctgaacctctgtctgtaaaatgagtagtgtctgtactttgaatgagggggttggtggcaggggccagttgaatgtgctgggcggggtggtgggaaggatagtaaatgtgctggggcaaactgacaaatcttcccatccatttcaccacccatctccatccaggccgcgctagagtactggaccaggaatttggatgcctgggttcaaatctgcatctgccatgcacttgtttctgaccttaggccagcccctttccctccctgagtctctattttcttatctacaatgagacagttggacaaaaaaatcttggcttcccttctaacattaacttcctaaagtatgcctccgattcattcccttgacactttttatttctaaggaagaaataaaaagagatacacaaacacataaacac

SEQ ID NO: 4 - DNA, 1240 bp, Homo sapiens
acatacatcgggtgtgagcacggaatagctgggcggcggctggtccacagacactgggagacagaaggggccggtccccaggcgcccgtgctgcagcagtgggatccactggggagaggctggagaccaccggtgtgaaggcctcgcgggtaaattcactgcagctggacttgccaaagatgacctgggagagtggattcatgagggacccatgggggatgccctaccccccttccctggggcacagccactgaccggcagagcctggctggggtcctcgcctgtcatgtactgcactcgcacggcaaggttgcgcacggagccctggcggctgctgaagttgaggctgttataccttagaccctcagtcatgccagtgcctgctctgtgcctgctctgggccctggcaatggtgacccggcctgcctcagcggcccccatgggcggcccagaactggcacagcatgaggagctgaccctgctcttccatgggaccctgcagctgggccaggccctcaacggtgtgtacaggaccacggagggacggctgacaaaggccaggaacagcctgggtctctatggccgcacaatagaactcctggggcaggaggtcagccggggccgggatgcagcccaggaacttcgggcaagcctgttggagactcagatggaggaggatattctgcagctgcaggcagaggccacagctgaggtgctgggggaggtggcccaggcacagaaggtgctacgggacagcgtgcagcggctagaagtccagctgaggagcgcctggctgggccctgcctaccgagaatttgaggtcttaaaggctcacgctgacaagcagagccacatcctatgggccctcacaggccacgtgcagcggcagaggcgggagatggtggcacagcagcatcggctgcgacagatccaggagagactccacacagcggcgctcccagcctgaatctgcctggatggaactgaggaccaatcatgctgcaaggaacacttccacgccccgtgaggcccctgtgcagggaggagctgcctgttcactgggatcagccagggcgccgggccccacttctgagcacagagcagagacagacgcaggcggggacaaaggcagaggatgtagccccattggggaggggtggaggaaggacatgtaccctttcatgcctacacacccctcattaaagcagagtcgtggcatctcaaaaaaaaaaaaaaaaaa

SEQ ID NO: 5 - DNA, 1899 bp, Homo sapiens
gtccgtactgcagagccgctgccggagggtcgttttaaagggccgcgttgccgccccctcggcccgccatgctgctatccgtgccgctgctgctcggcctcctcggcctggccgtcgccgagcccgccgtctacttcaaggagcagtttctggacggagacgggtggacttcccgctggatcgaatccaaacacaagtcagattttggcaaattcgttctcagttccggcaagttctacggtgacgaggagaaagataaaggtttgcagacaagccaggatgcacgcttttatgctctgtcggccagtttcgagcctttcagcaacaaaggccagacgctggtggtgcagttcacggtgaaacatgagcagaacatcgactgtgggggcggctatgtgaagctgtttcctaatagtttggaccagacagacatgcacggagactcagaatacaacatcatgtttggtcccgacatctgtggccctggcaccaagaaggttcatgtcatcttcaactacaagggcaagaacgtgctgatcaacaaggacatccgttgcaaggatgatgagtttacacacctgtacacactgattgtgcggccagacaacacctatgaggtgaagattgacaacagccaggtggagtccggctccttggaagacgattgggacttcctgccacccaagaagataaaggatcctgatgcttcaaaaccggaagactgggatgagcgggccaagatcgatgatcccacagactccaagcctgaggactgggacaagcccgagcatatccctgaccctgatgctaagaagcccgaggactgggatgaagagatggacggagagtgggaacccccagtgattcagaaccctgagtacaagggtgagtggaagccccggcagatcgacaacccagattacaagggcacttggatccacccagaaattgacaaccccgagtattctcccgatcccagtatctatgcctatgataactttggcgtgctgggcctggacctctggcaggtcaagtctggcaccatctttgacaacttcctcatcaccaacgatgaggcatacgctgaggagtttggcaacgagacgtggggcgtaacaaaggcagcagagaaacaaatgaaggacaaacaggacgaggagcagaggcttaaggaggaggaagaagacaagaaacgcaaagaggaggaggaggcagaggacaaggaggatgatgaggacaaagatgaggatgaggaggatgaggaggacaaggaggaagatgaggaggaagatgtccccggccaggccaaggacgagctgtagagaggcctgcctccagggctggactgaggcctgagcgctcctgccgcagagcttgccgcgccaaataatgtctctgtgagactcgagaactttcatttttttccaggctggttcggatttggggtggattttggttttgttcccctcctccactctcccccaccccctccccgccctttttttttttttttttaaactggtattttatcctttgattctccttcagccctcacccctggttctcatctttcttgatcaacatcttttcttgcctctgtgccccttctctcatctcttagctcccctccaacctggggggcagtggtgtggagaagccacaggcctgagatttcatctgctctccttcctggagcccagaggagggcagcagaagggggtggtgtctccaaccccccagcactgaggaagaacggggctcttctcatttcacccctccctttctcccctgcccccaggactgggccacttctgggtggggcagtgggtcccagattggctcacactgagaatgtaagaactacaaacaaaatttctattaaattaaattttgtgtctc

SEQ ID NO: 6 - DNA, 1066 bp, Homo sapiens
ggtttcctcggggctttcgggatcttcacctaatatccggtattattttatgagaggagtggtcttggctgtcagaactggatccctggggtgatatttgggaattagtggagtgatctctgaagacctagggctatgatctggagctgctgtggctgaaatttggggcctctgaagtggcatggagattgaggtccagagagcctgagatcttgagggctgacatttggagagatggggtcgagggttgtctttgggccttgactgctttgggcctttctcactctcattcccgggatgctttgccagaatctctgctggattggccgtaaccctgtccccgagcgggctcacagggtctgaaggccacgcatgaggcaaaggtaaagttctgagccacccggtgcctccttcccaggactgcaagatggaggaaggcgggaacctaggaggcctgattaagatggtccatctactggtcttgtcaggtgcctggggcatgcaaatgtgggtgaccttcgtctcaggcttcctgcttttccgaagccttccccgacataccttcggactagtgcagagcaaactcttccccttctacttccacatctccatgggctgtgccttcatcaacctctgcatcttggcttcacagcatgcttgggctcagctcacattctgggaggccagccagctttacctgctgttcctgagccttacgctggccactgtcaacgcccgctggctggaaccccgcaccacagctgccatgtgggccctgcaaaccgtggagaaggagcgaggcctgggtggggaggtaccaggcagccaccagggtcccgatccctaccgccagctgcgagagaaggaccccaagtacagtgctctccgccagaatttcttccgctaccatgggctgtcctctctttgcaatctgggctgcgtcctgagcaatgggctctgtctcgctggccttgccctggaaataaggagcctctagcatgggccctgcatgctaataaatgcttcttcaaaaaaaaaaaaaaaaaaaaaaaaaaaaaaaaaaaaa

SEQ ID NO: 7 - DNA, 2438 bp, Homo sapiens
cccggcggcgccaaccgaagcgccccgcctgatccgtgtccgacatgctgcgccgcgctctgctgtgcctggccgtggccgccctggtgcgcgccgacgcccccgaggaggaggaccacgtcctggtgctgcggaaaagcaacttcgcggaggcgctggcggcccacaagtacctgctggtggagttctatgccccttggtgtggccactgcaaggctctggcccctgagtatgccaaagccgctgggaagctgaaggcagaaggttccgagatcaggttggccaaggtggacgccacggaggagtctgacctggcccagcagtacggcgtgcgcggctatcccaccatcaagttcttcaggaatggagacacggcttcccccaaggaatatacagctggcagagaggctgatgacatcgtgaactggctgaagaagcgcacgggcccggctgccaccaccctgcctgacggcgcagctgcagagtccttggtggagtccagcgaggtggctgtcatcggcttcttcaaggacgtggagtcggactctgccaagcagtttttgcaggcagcagaggccatcgatgacataccatttgggatcacttccaacagtgacgtgttctccaaataccagctcgacaaagatggggttgtcctctttaagaagtttgatgaaggccggaacaactttgaaggggaggtcaccaaggagaacctgctggactttatcaaacacaaccagctgccccttgtcatcgagttcaccgagcagacagccccgaagatttttggaggtgaaatcaagactcacatcctgctgttcttgcccaagagtgtgtctgactatgacggcaaactgagcaacttcaaaacagcagccgagagcttcaagggcaagatcctgttcatcttcatcgacagcgaccacaccgacaaccagcgcatcctcgagttctttggcctgaagaaggaagagtgcccggccgtgcgcctcatcaccctggaggaggagatgaccaagtacaagcccgaatcggaggagctgacggcagagaggatcacagagttctgccaccgcttcctggagggcaaaatcaagccccacctgatgagccaggagctgccggaggactgggacaagcagcctgtcaaggtgcttgttgggaagaactttgaagacgtggcttttgatgagaaaaaaaacgtctttgtggagttctatgccccatggtgtggtcactgcaaacagttggctcccatttgggataaactgggagagacgtacaaggaccatgagaacatcgtcatcgccaagatggactcgactgccaacgaggtggaggccgtcaaagtgcacagcttccccacactcaagttctttcctgccagtgccgacaggacggtcattgattacaacggggaacgcacgctggatggttttaagaaattcctggagagcggtggccaggatggggcaggggatgatgacgatctcgaggacctggaagaagcagaggagccagacatggaggaagacgatgatcagaaagctgtgaaagatgaactgtaatacgcaaagccagacccgggcgctgccgagacccctcgggggctgcacacccagcagcagcgcacgcctccgaagcctgcggcctcgcttgaaggagggcgtcgccggaaacccagggaacctctctgaagtgacacctcacccctacacaccgtccgttcacccccgtctcttccttctgcttttcggtttttggaaagggatccatctccaggcagcccaccctggtggggcttgtttcctgaaaccatgatgtactttttcatacatgagtctgtccagagtgcttgctaccgtgttcggagtctcgctgcctccctcccgcgggaggtttctcctctttttgaaaattccgtctgtgggatttttagacatttttcgacatcagggtatttgttccaccttggccaggcctcctcggagaagcttgtcccccgtgtgggagggacggagccggactggacatggtcactcagtaccgcctgcagtgtcgccatgactgatcatggctcttgcatttttgggtaaatggagacttccggatcctgtcagggtgtcccccatgcctggaagaggagctggtggctgccagccctggggcccggcacaggcctgggccttccccttccctcaagccagggctcctcctcctgtcgtgggctcattgtgaccactggcctctctacagcacggcctgtggcctgttcaaggcagaaccacgacccttgactcccgggtggggaggtggccaaggatgctggagctgaatcagacgctgacagttcttcaggcatttctatttcacaatcgaattgaacacattggccaaataaagttgaaattttaccaccaaaaaaaaaaaaaaaa

SEQ ID NO: 8 - DNA, 574 bp, Homo sapiens
cgttgggaacggttgtaggacgtggctctttattcgtgagttttccatttacctccgctgaacctagagcttcagacgccctatggcgtccgcctcgacccaaccggcggccttgagcgctgagcaagcaaaggtggtcctcgcggaggtgatccaggcgttctccgccccggagaatgcagtgcgcatggacgaggctcgggataacgcctgcaacgacatgggtaagatgctgcaattcgtgctgcccgtggccacgcagatccagcaggaggttatcaaagcctatggcttcagctgcgacggggaaggtgtccttaagtttgctcgcttggtcaagtcctacgaagcccaggatcctgagatcgccagcctgtcaggcaagctgaaggcgctgtttctgccgcccatgaccctgccaccccatgggcctgctgctggtggcagcgtggccgcctcctgagagttggccctcccttgtgccactgccaggggaggaaaggccttgatgttccagacaataataaatgcgcctgtgacttaaaaaaaaaaaaaaaaaaaaaaaaaaaaaaaa

SEQ ID NO: 9 - DNA, 927 bp, Homo sapiens
agtctgggacgcgccgccgccatgatcatccctgtacgctgcttcacttgtggcaagatcgtcggcaacaagtgggaggcttacctggggctgctgcaggccgagtacaccgagggggacgcgctggatgccctgggcctgaagcgctactgctgccgccggatgctgctggcccacgtggacctgatcgagaagctgctcaattatgcacccctggagaagtgaccacgctgaaacccacccacccgctgtgctgaccatgggccctgagcgtcctaccccgaattcacgaggctgaggcatccgggagctggcgtaatgcctggccgcagtgtgtgtgtatcccataccccactctggaaggaaccatccagtaaaggtctttcagaaccactaaggtcccagccctcactaggatgtcaggagccaggtctaggcccagctttcacactgtggcagcccagtgaagcagactgggccatgaactctcctagccctggggccagcctgttccacaggcacccctgcaggaggcgctgccaggagagccttccatctcggggctctttgaggttccctccttctgggtgttcttcaggctgagcagagaggctcctgtaccctctctctcggaatctgaagagccagatttaggccgggcaaaggggctcacccctataatcccaggactttgggaggccaaggcaggaggatcacttgagtccagaaattcaagacccgcctgggcatcataatgagaccccatctctacaacaaaatttaataaattagctgggcacagtgttcacacctgtagtcccggccactcagggggctgaggcaggaggatcactggaacctgggaggttgccactgcaaaaaaaaaaaaaaaaaaaaaaaaaaaaaaaaaaaaaaaaaaaaaaaaaa

SEQ ID NO: 10 - DNA, 983 bp, Homo sapiens
gtggaattcatggcatctacttcgtatgactattgcagagtgcccatggaagacggggataagcgctgtaagcttctgctggggataggaattctggtgctcctgatcatcgtgattctgggggtgcccttgattatcttcaccatcaaggccaacagcgaggcctgccgggacggccttcgggcagtgatggagtgtcgcaatgtcacccatctcctgcaacaagagctgaccgaggcccagaagggctttcaggatgtggaggcccaggccgccacctgcaaccacactgtgatggccctaatggcttccctggatgcagagaaggcccaaggacaaaagaaagtggaggagcttgagggagagatcactacattaaaccataagcttcaggacgcgtctgcagaggtggagcgactgagaagagaaaaccaggtcttaagcgtgagaatcgcggacaagaagtactaccccagctcccaggactccagctccgctgcggcgccccagctgctgattgtgctgctgggcctcagcgctctgctgcagtgagatcccaggaagctggcacatcttggaaggtccgtcctgctcggcttttcgcttgaacattcccttgatctcatcagttctgagcgggtcatggggcaacacggttagcggggagagcacggggtagccggagaagggcctctggagcaggtctggaggggccatggggcagtcctgggtgtggggacacagtcgggttgacccagggctgtctccctccagagcctccctccggacaatgagtcccccctcttgtctcccaccctgagattgggcatggggtgcggtgtggggggcatgtgctgcctgttgttatgggttttttttgcggggggggttgcttttttctggggtctttgagctccaaaaaataaacacttcctttgagggagagcaaaaaaaaaaaaaaaaaaaaaaaaaaaaaaaaaaaa

SEQ ID NO: 11 - DNA, 896 bp, Homo sapiens
cggggaggcgcggaaagccgacgcgcgtccattggtcggctggacgaggggaggagccgctggctcccagccccgccgcgatgagcctcggccgcctttgccgcctactgaagccggcgctgctctgtggggctctggccgcgcctggcctggccgggaccatgtgcgcgtcccgggacgactggcgctgtgcgcgctccatgcacgagttttccgccaaggacatcgacgggcacatggttaacctggacaagtaccggggcttcgtgtgcatcgtcaccaacgtggcctcccagtgaggcaagaccgaagtaaactacactcagctcgtcgacctgcacgcccgatacgctgagtgtggtttgcggatcctggccttcccgtgtaaccagttcgggaagcaggagccagggagtaacgaagagatcaaagagttcgccgcgggctacaacgtcaaattcgatatgttcagcaagatctgcgtgaacggggacgacgcccacccgctgtggaagtggatgaagatccaacccaagggcaagggcatcctgggaaatgccatcaagtggaacttcaccaagttcctcatcgacaagaacggctgcgtggtgaagcgctacggacccatggaggagcccctggtgatagagaaggacctgccccactatttctagctccacaagtgtgtggccccgcccgagcccctgcccacgcccttggagccttccaccggcactcatgacggcctgcctgcaaacctgctggtggggcagacccgaaaatccagcgtgcaccccgccggaggaaggtcccatggcctgctgggcttggctcggcgcccccacccctggctaccttgtgggaataaacagacaaattagaaaaaaaaaaaaaaa

SEQ ID NO: 12 - DNA, 870 bp, Homo sapiens
aggttggaactattgaagcccgctttcaggttcttttccccattttccctttgaaaggaagacttctggcttctcctaaatctccgttctctgggtaaggggagtccaagcctctgtcatgaggaacggaaatgcgagggcctcgggtgttactctaaaatccgccctcagcttgcacgccggaagctgcgattcctgcagcggaagaggcgtgatctggccttcgactcgctatgtccactaacaatatgtcggacccacggaggccgaacaaagtgctgaggtacaagcccccgccgagcgaatgtaacccggccttggacgacccgacgccggactacatgaacctgctgggcatgatcttcagcatgtgcggcctcatgcttaagctgaagtggtgtgcttgggtcgctgtctactgctccttcatcagctttgccaactctcggagctcggaggacacgaagcaaatgatgagtagcttcatgctgtccatctctgccgtggtgatgtcctatctgcagaatcctcagcccatgacgcccccatggtgataccagcctagaagggtcacattttggaccctgtctatccactaggcctgggctttggctgctaaacctgctgccttcagctgccatcctggacttccctgaatgaggccgtctcggtgcccccagctggatagagggaacctggccctttcctagggaacaccctaggcttacccctcctgcctcccttcccctgcctgctgctgggggagatgctgtccatgtttctaggggtattcatttgctttctcgttgaaacctgttgttaataaagtttttcactctgaaaaaaaaaaaaaaaaaaaaaaaaaaaaaa

SEQ ID NO: 13 - DNA, 1440 bp, Homo sapiens
aggcctctagtcccagtaggaggtttgactaagatcaatcatgacgacttacagtgacaaaggggcaaagcctgagagaggccgattcctccacttccactctgtgaccttctgggttggcaacgccaagcaggccgcgtcattctactgcagcaagatgggctttgaacctctagcctacaggggcctggagaccggttcccgggaggtggtcagccatgtaatcaaacaagggaagattgtgtttgtcctctcctcagcgctcaacccctggaacaaagagatgggcgatcacctggtgaaacacggtgacggagtgaaggacattgcgttcgaggtggaagattgtgactacatcgtgcagaaagcacgggaacggggcgccaaaatcatgcgggagccctgggtagagcaagacaagtttgggaaggtgaagtttgctgtgctgcagacgtatggggacaccacacacaccctggtggagaagatgaactacatcggccaattcttgcctggatatgaggccccagcgttcatggaccccctacttcctaaactgcccaaatgcagtctggagatgatcgaccacattgtgggaaaccagcctgatcaggagatggtgtccgcctccgaatggtacctgaaaaacctgcagttccaccgcttctggtccgtggatgacacgcaggtgcacacggaatatagctctctgcgatccattgtggtggccaactatgaagagtccatcaagatgcccatcaatgagccagcgcctggcaagaagaagtcccagatccaggaatatgtggactataacgggggcgctggggtccagcacatcgctctcaagaccgaagacatcatcacagcgattcgccacttgagagagagaggcctggagttcttatctgttccctccacgtactacaaacaactgcgggagaagctgaagacggccaagatcaaggtgaaggagaacattgatgccctggaggagctgaaaatcctggtggactacgacgagaaaggctacctcctgcagatcttcaccaaaccggtgcaggaccggcccacgctcttcctggaagtcatccagcgccacaaccaccagggttttggagccggcaacttcaactcactgttcaaggctttcgaggaggagcagaacctgcggggtaacctcaccaacatggagaccaatggggtggtgcccggcatgtaagccccgcccaccccacggaggccacagccacacagccacgccccctgattctggaactcgcccaacttccctactggctgctccccttgggtcccgcccaccagcggactcggcccccaaggctccgcccacactgaccacgcccctcggcggggccgccctctgctccagccctcccgattaaagcgtgccccggtccaaaaaaaaaaaaaaaaaaa

SEQ ID NO: 14 - DNA, 1583 bp, Homo sapiens
gattcgctgctccgcagcacggccggagctggtcgggtcaagagtcgggatttgtggggagaggttttccactggtcaagagaaggctttaagaaagacggtattaatctcccgttgcggctcccgcctggtcccatcttctgcccgctcctccaggaaatgaatctgctgccgaatattgagagtccagtgactcggcaggagaagatggcgaccgtgtgggatgaggccgagcaagatggaattggggaggaggtgctcaagatgtccacggaggagatcatccagcgcacacggctgctggacagtgagatcaagatcatgaagagtgaagtgttgagagtcacccatgagctccaagccatgaaggacaagataaaagagaacagtgagaaaatcaaagtgaacaagaccctgccgtaccttgtctccaacgtcatcgagctcctggatgttgatcctaatgaccaagaggaggatggtgccaatattgacctggactcccagaggaagggcaagtgtgctgtgatcaaaacctctacacgacagacgtacttccttcctgtgattgggttggtggatgctgaaaagctaaagccaggagacctggtgggtgtgaacaaagactcctatctgatcctggagacgctgcccacagagtatgactcgcgggtgaaggccatggaggtagacgagaggcccacggagcaatacagtgacattgggggtttggacaagcagatccaggagctggtggaggccattgtcttgccaatgaaccacaaggagaagtttgagaacttggggatccaacctccaaaaggggtgctgatgtatgggcccccagggacggggaagaccctcctggcccgggcctgtgccgcacagactaaggccaccttcctaaagctggctggcccccagctggtgcagatgttcattggagatggtgccaagctagtccgggatgcctttgccctggccaaggagaaagcgccctctatcatcttcattgatgagttggatgccatcggcaccaagcgctttgacagtgagaaggctggggaccgggaggtgcagaggacaatgctggagcttctgaaccagctggatggcttccagcccaacacccaagttaaggtaattgcagccacaaacagggtggacatcctggaccccgccctcctccgctcgggccgccttgaccgcaagatagagttcccgatgcccaatgaggaggcccgggccagaatcatgcagatccactcccgaaagatgaatgtcagtcctgacgtgaactacgaggagctggcccgctgcacagatgacttcaatggggcccagtgcaaggctgtgtgtgtggaggcgggcatgatcgcactgcgcaggggtgccacggagctcacccacgaggactacatggaaggcatcctggaggtgcaggccaagaagaaagccaacctacaatactacgcctagggcacacaggccagccccagtctcacggctgaagtgcgcaataaaagatggtttagggtccctgccaaaaaaaaaaaaaaaaaaaaaaaaaaaaaaaaaaaaaa

SEQ ID NO: 15 - DNA, 1646 bp, Homo sapiens
gctgttgcgggagcgcgccctcagcgaagcaagtgaggcatctcactgggaaagtcgaatgtgtgtggcggccgccgccgaggcgggttccgaagagacctcagcagggcaggccagggcctacgcgaacgcccacccttaagagcgcggggacagggaactggagcgttcctcccagcccccgacgtcgcgggcccagtgtccccgtccaggctggttgggcgcacgcgcggccccactcgcccccacgcgtgcgtccccgctggtcccgcccccggccggaagttccggcggcggagctgggccgggcccgagcggatcgcgggctcgggctgcggggctccggctgcgggcgctgggccgcgaggcgcggagcttgggagcggagcccaggccgtgccgcgcggcgccatgaagggcaaggaggagaaggagggcggcgcacggctgggcgctggcggcggaagccccgagaagagcccgagcgcgcaggagctcaaggagcagggcaatcgtctgttcgtgggccgaaagtacccggaggcggcggcctgctacggccgcgcgatcacccggaacccgctggtggccgtgtattacaccaaccgggccttgtgctacctgaagatgcagcagcacgagcaggccctggccgactgccggcgcgccctggagctggacgggcagtctgtgaaggcgcacttcttcctggggcagtgccagctggagatggagagctatgatgaggccatcgccaatctgcagcgagcttacagcctggccaaggagcagcggctgaacttcggggacgacatccccagcgctcttcgaatcgcgaagaagaagcgctggaacagcattgaggagcggcgcatccaccaggagagcgagctgcactcctacctctccaggctcattgccgcggagcgtgagagggagctggaagagtgccagcgaaaccacgagggtgatgaggacgacagccacgtccgggcccagcaggcctgcattgaggccaagcacgacaagtacatggcggacatggacgagcttttttctcaggtggatgagaagaggaagaagcgagacatccccgactacctgtgtggcaagatcagctttgagctgatgcgggagccgtgcatcacgcccagtggcatcacctacgaccgcaaggacatcgaggagcacctgcagcgtgtgggtcattttgaccccgtgacccggagccccctgacccaggaacagctcatccccaacttggctatgaaggaggttattgacgcattcatctctgagaatggctgggtggaggactactgaggttccctgccctacctggcgtcctggtccaggggagccctgggcagaagcccccggcccctatacatagtttatgttcctggccaccccgaccgcttcccccaagttctgctgttggactctggactgtttcccctctcagcatcgcttttgctgggccgtgatcgtccccctttgtgggctggaaaagcaggtgagggtgggctgggctgaggccattgccgccactatctgtgtaataaaatccgtgagcacgaggtgggacgtgctggtgtgtgaaaaaaaaaaaaaaaaaaaaaaaaaaaaaaaaaaaaaaaaaaaaa

SEQ ID NO: 16 - DNA, 1146 bp, Homo sapiens
ttttgcgaacggcgagcagcggcggcggcgcggagagacgcagcggaggttttcctggtttcggaccccagcggccggatggtgaaatcctccctgcagcggatcctcaatagccactgcttcgccagagagaaggaaggggataaacccagcgccaccatccacgccagccgcaccatgccgctcctaagcctgcacagccgcggcggcagcagcagtgagagttccagggtctccctccactgctgtagtaacccgggtccggggcctcggtggtgctcctgatgcccctcacccacccctgaagatcccaggtgggcgagggaatagtcagagggatcacaatctttcagctaacttattctactccgatgatcggctgaatgtaacagaggaactaacgtccaacgacaagacgaggattctcaacgtccagtccaggctcacagacgccaaacgcattaactggcgaacagtgctgagtggcggcagcctctacatcgagatcccgggcggcgcgctgcccgaggggagcaaggacagctttgcagttctcctggagttcgctgaggagcagctgcgagccgaccatgtcttcatttgcttccacaagaaccgcgaggacagagccgccttgctccgaaccttcagctttttgggctttgagattgtgagaccggggcatccccttgtccccaagagacccgacgcttgcttcatggcctacacgttcgagagagagtcttcgggagaggaggaggagtagggccgcctcggggctgggcatccggcccctggggccaccccttgtcagccgggtgggtaggaaccgtagactcgctcatctcgcctgggtttgtccgcatgttgtaatcgtgcaaataaacgctcactccgaattagcggtgtatttcttgaagtttaatattgtgtttgtgatactgaagtatttgctttaattctaaataaaaatttatattttacttttttattgctggtttaagatgattcagattatccttgtactttgaggagaagtttcttatttggagtcttttggaaacagtcttagtcttttaacttggaaagatgaggtattaatcccctccattgctctccaaaagccaataaagtgattacacccga

SEQ ID NO: 17 - DNA, 618 bp, Homo sapiens
cttttgcgggtggcggcgaacgcggagagcacgccatgaaggcctcgggcacgctacgagagtacaaggtagtgggtcgctgcctgcccacccccaaatgccacacgccgcccctctaccgcatgcgaatctttgcgcctaatcatgtcgtcgccaagtcccgcttctggtactttgtatctcagttaaagaagatgaagaagtcttcaggggagattgtctactgtgggcaggtgtttgagaagtcccccctgcgggtgaagaacttcgggatctggctgcgctatgactcccggagcggcacccacaacatgtaccgggaataccgggacctgaccaccgcaggcgctgtcacccagtgctaccgagacatgggtgcccggcaccgcgcccgagcccactccattcagatcatgaaggtggaggagatcgcggccagcaagtgccgccggccggctgtcaagcagttccacgactccaagatcaagttcccgctgccccaccgggtcctgcgccgtcagcacaagccacgcttcaccaccaagaggcccaacaccttcttctaggtgcagggccctcgtccgggtgtgccccaaataaactcaggaacgccccggt

SEQ ID NO: 18 - DNA, 1794 bp, Homo sapiens
cacatataataatagcaactcctggtcgactgattgaccacttgaaacctttcgtattttccaagtgctggcaagcgcttcctgcgcaggccgaggcgacctggagtttgtgacgctgtgatggtctagaggctggagattcaagatctgggtgccatcattttctggttctgttgatgaccctcttccaggttacatacagcttacatcttgcatcctcaagcgtttttcttataaggctaaaaattcacaaagcatatatcaatgaatcaggaggatctagatccggatagtactacagatgtgggagatgttacaaatactgaagaagaacttattagagaatgtgaagaaatgtggaaagatatggaagaatgtcagaataaattatcacttattggaactgaaacactcaccgattcaaatgctcagctatcattgttaattatgcaagtaaaatgtttaaccgctgaactcagtcaatggcagaaaaaaacacctgaaacaattcccttgactgaagacgttctcataacattaggaaaagaagagttccaaaagctgagacaagatcttgaaatggtactgtccactaaggagtcaaagaatgaaaagttaaaggaagacttagaaagggaacaacggtggttggatgaacagcaacagataatggaatctcttaatgtactacacagtgaattgaaaaataaggttgaaacattttctgaatcaagaatctttaatgaactgaaaactaaaatgcttaatataaaagaatataaggagaaactcttgagtaccttgggcgagtttctagaagaccattttcctctgcctgatagaagtgttaaaaagaaaaagaaaaacattcaagaatcatctgtaaacctgataacactgcatgaaatgttagagattcttataaatagattatttgatgttccacatgatccatatgtcaaaattagtgattccttttggccaccttatgttgagctgctgctgcgtaatggaattgccttgagacatccagaagatccaacccgaataagattagaagctttccatcagtaaaaggatgttttcttttttcacacagtaaaaattcttatcattcaaggatattggaaccacaggactatttggataaaaaacattatttgcaaattaatgcgcatagtacttttattgcaaaatggcatgtgctgccatctattattcatttttaaatggtcatttcttattcagtgagtgctttagtgttttaaactatatggataagaatgcaggtagataatattctaggcataaaacatttaatgtaccttacctcatgcaatattctttggattctttgttgatttatgatattgctaatataatattttcttaaaatatataacaatatcttttatgcatttgagttccagctggtgcttctttatatttagaaattataatgggaaggtcatttaatttacagatggttttaaaattgaggtaatatctgaggtggcataatttaaaaatatttagcaaatttgtttcatatatactgtcttatttctagatttgtttaaaattggaatatgaaaaactaatggataaagctagcataaaattgatattttagtttgtattattaatatatcatgttaccttatatattaatctactcttgattctgctaattattaccaacaaaattgtattcatgacattttattaatcctctgtgaattttctgtaaataaaattatttctgaaaatctctaaaaaaaaaaaaaaaaaaaa

SEQ ID NO: 19 - DNA, 959 bp, Homo sapiens
gcagtggaggcggcccaggcccgccttccgcagggtgtcgccgctgtgccgctagcggtgccccgcctgctgcggtggcaccagccaggaggcggagtggaagtggccgtggggcgggtatgggactagctggcgtgtgcgccctgagacgctcagcgggctatatactcgtcggtggggccggcggtcagtctgcggcagcggcagcaagacggtgcagtgaaggagagtgggcgtctggcggggtccgcagtttcagcagagccgctgcagccatggccccaatcaaggtgggagatgccatcccagcagtggaggtgtttgaaggggagccagggaacaaggtgaacctggcagagctgttcaagggcaagaagggtgtgctgtttggagttcctggggccttcacccctggatgttccaagacacacctgccagggtttgtggagcaggctgaggctctgaaggccaagggagtccaggtggtggcctgtctgagtgttaatgatgcctttgtgactggcgagtggggccgagcccacaaggcggaaggcaaggttcggctcctggctgatcccactggggcctttgggaaggagacagacttattactagatgattcgctggtgtccatctttgggaatcgacgtctcaagaggttctccatggtggtacaggatggcatagtgaaggccctgaatgtggaaccagatggcacaggcctcacctgcagcctggcacccaatatcatctcacagctctgaggccctgggccagattacttcctccacccctccctatctcacctgcccagccctgtgctggggccctgcaattggaatgttggccagatttctgcaataaacacttgtggtttgcggccaaaaaaaaaaaaaaaaaaaaaaaaaaaaaaaaaaaaaaaaaaaaaaaaaaaaaaaaaaaaaaaaaaaaaaaaaaaa

SEQ ID NO: 20 - DNA, 1136 bp, Homo sapiens
agtcccggaactgctagaacgaaccattcgcatatggagggggtgacccaccatctcagaacattaaaaaagggaaagaatcccctggtgaactacagtgaaagtcttattgagcatttaaatggaaataaaaatattcagtggacctaatgaagagtagatgactttcccttctgtcccctccccgacaggcactcatggtaccggcgccggcgcagctgtgactgtcgctgcagacggaaactgactggggtcaattcaagtcatgcaggctgtgagaaacgcggggtcgcggttcctgcggtcctggacttggccccagacagccggcagggtcgtggccagaacgccggccgggaccatctgcacaggcgctcgacagctccaagacgctgcggccaagcagaaagttgaacagaacgcggctcccagccacaccaagttcagcatttaccctcccattccaggagaggagagctctctgaggtgggcaggaaagaaatttgaggagatcccaattgcacacattaaagcatcccacaacaacacacagatccaggtagtctctgctagtaatgagccccttgcctttgcttcctgtggcacagagggatttcggaatgccaagaagggcacaggcatcgcagcacagacagcaggcatagccgcagcggcgagagctaaacaaaagggcgtgatccacatccgagttgtggtgaaaggcctggggccaggacgcttgtctgccatgcacggactgatcatgggcggcctggaagtgatctcaatcacagacaacaccccaatcccacacaacggctgccgccccaggaaggctcggaagctgtgatgggaaggaggcctgcacttggacctgacctcaagcctcagctccagtgggaccttgtaaaatgctccctgtcagagctctccagaatatgcttgttggagatccttcaggcagtaagggagagttttgcctccttacacagtggcctttgcttgcacctccagctggagatgggtgtgccccagaagtaagctttgcatctcttacaagaggggagctacaggggcagccgtggcctaggcccaaactctgctctgagaaaataaatatctgtaccacctgtcaa

SEQ ID NO: 21 - DNA, 1053 bp, Homo sapiens
agtcccggaactgctagaacgaaccattcgcatatggagggggtgacccaccatctcagaacattaaaaaagggaaagaatcccctggtgaactacagtgaaagtcttattgagcatttaaatggaaataaaaatattcagtggacctaatgaagagtagatgactttcccttctgtcccctccccgacaggcactcatggtaccggcgccggcgcagctgtgactgtcgctgcagacggaaactgactggggtcaattcaagtcatgcaggctgtgagaaacgcggggtcgcggttcctgcggtcctggacttggccccagacagccggcagggtcgtggccagaacgccggccgggaccatctgcacaggcgctcgacagctccaagacgctgcggccaagcagaaagttgaacagaacgcggctcccagccacaccaagttcagcacacagatccaggtagtctctgctagtaatgagccccttgcctttgcttcctgtggcacagagggatttcggaatgccaagaagggcacaggcatcgcagcacagacagcaggcatagccgcagcggcgagagctaaacaaaagggcgtgatccacatccgagttgtggtgaaaggcctggggccaggacgcttgtctgccatgcacggactgatcatgggcggcctggaagtgatctcaatcacagacaacaccccaatcccacacaacggctgccgccccaggaaggctcggaagctgtgatgggaaggaggcctgcacttggacctgacctcaagcctcagctccagtgggaccttgtaaaatgctccctgtcagagctctccagaatatgcttgttggagatccttcaggcagtaagggagagttttgcctccttacacagtggcctttgcttgcacctccagctggagatgggtgtgccccagaagtaagctttgcatctcttacaagaggggagctacaggggcagccgtggcctaggcccaaactctgctctgagaaaataaatatctgtaccaccaaaaaaaaaaaaaaaaaaaaaa

SEQ ID NO: 22 - DNA, 1400 bp, Homo sapiens
gggctgctgtgattttaaagttatgtagcattgtggttgtatgtcttcacagcagttcaagaatatgcttttaaaggaattgtagttctttgttgggaaaattttctattattttgcttcctcataagtgatgctcatcttttcaaagaaatacatatacatttttaagtgtatgtatgagtagtatgtgtatttctgtctacaaaattataaaatgatgaaaccattctgtcatacctagaatataaaagggaaaaaagtgtgaattctttaaatatttttctatgtcctaatcactggaagtcctatagttgtttcaaactgttctgtaaaatttgtcttgttgcttatgttcaaaatatatttccatgttttagtgaagaaaagtacaaagtggcttgacagaaagtgaaattaagactgctggtaatcctttgaagagacttagtaataggagttggcaaatatttaagagtggcattggagacaaatggcagattcaggataggctgtttctgtaggaagcatggttctggatgagtgctgctcataaagtcattgaaagttattccagatagtttaatagaagtgtttgtttagcaaagacaacagattttgctattttgactgcattgattgtattagttcagatttatgaaagaaagagcccggaatacagaaataagataacaatagaaaatttaagcatgtcaagaactctaatgctggaattgtcacagcaaccacaaaattactgggcatcaatagactcctaagaattaagagaaattgcagaatgtaagccataattgtcattttaggaacattatgctagagcacaagtttaggattgggcaaaagagttgatttttaagattgcattggtgttctctctctctctttttttttttttttttggagatggattcttgttccgtcacccaggctggagtgcagtggcacaagctcggctcactgcaacctccgcctcccaggatcaagcgattctcctgcctcagcctcctgagtagctgggattacaggcatgctccaccatgcccggctaatttttgtatttttagtagagacagggtttcaccatgttggccaggctggtctcaaactcctgaccttgtgatccacccgccttggcctcccagagtgctgtgattacagctgtgagcctccgtgcccaggccagtgttctctcttaaatgtgtttcaatatggtggacatttattgagcacttgtgttgggcgtttcaacaggaggcactggtacgaaaagtagcttgttctagttcatatatcatttgcactttgcttaacttgtataagtactttttactgtttaataaatattttattagaaaaaaaaaaaaaaaaaaaaaaaaaaaaaa

SEQ ID NO: 23 - DNA, 1850 bp, Homo sapiens
cgcgctcgcagctcgcaggcgccgcgtagccgtcgccaccgccgccagcccgtgcgccctcggcgcgtacccgccgcgctcccatccccgccgccggccaggggcgcgctcggccgccccggacagtgtcccgctgcggctccgcggcgatggccaccaagatcgacaaagaggcttgccgggcggcgtacaacctggtgcgcgacgacggctcggccgtcatctgggtgacttttaaatatgacggctccaccatcgtccccggcgagcagggagcggagtaccagcacttcatccagcagtgcacagatgacgtccggttgtttgccttcgtgcgcttcaccaccggggatgccatgagcaagaggtccaagtttgccctcatcacgtggatcggtgagaacgtcagcgggctgcagcgcgccaaaaccgggacggacaagaccctggtgaaggaggtcgtacagaatttcgctaaggagtttgtgatcagtgatcggaaggagctggaggaagatttcatcaagagcgagctgaagaaggcggggggagccaattacgacgcccagacggagtaaccccagcccccgccacaccaccccttgccaaagtcatctgcctgctccccgggggagaggaccgccggcctcagctactagcccaccagcccaccagggagaaaagaagccatgagaggcagcgcccgccaccctgtgtccacagcccccaccttcccgcttcccttagaaccctgccgtgtcctatctcatgacgctcatggaacctctttctttgatcttctttttcttttctccccctcttttttgttctaaagaaaagtcattttgatgcaaggtcctgcctgccatcagatccgaggtgcctcctgcagtgaccccttttcctggcatttctcttccacgcgacgaggtctgcctagtgagatctgcatgacctcacgttgctttccagagcccgggcctattttgccatctcagttttcctggaccctgcttcctgtgtaccactgaggggcagctgggccaggagctgtgcccggtgcctgcagccttcataagcacacacgtccattccctactaaggcccagacctcctggtatctgccccgggctccctcatcccacctccatccggagttgcctaagatgcatgtccagcataggcaggattgctcggtggtgagaaggttaggtccggctcagactgaataagaagagataaaatttgccttaaaacttacctggcagtggctttgctgcacggtctgaaaccacctgttcccaccctcttgaccgaaatttccttgtgacacagagaagggcaaaggtctgagcccagagttgacggagggagtatttcagggttcacttcaggggctcccaaagcgacaagatcgttagggagagaggcccagggtggggactgggaatttaaggagagctgggaacggatcccttaggttcaggaagcttctgtgtaagctgcgaggatggcttgggccgaagggttgctctgcccgccgcgctagctgtgagctgagcaaagccctgggctcacagcaccccaaaagcctgtggcttcagtcctgcgtctgcaccacacattcaaaaggatcgttttgttttgtttttaaagaaaggtgagattggcttggttcttcatgagcacatttgatatagctctttttctgtttttccttgctcatttcgttttggggaagaaatctgtactgtattgggattgtaaagaacatctctgcactcagacagtttacagaaataaatgttttttttgtttttcagaaaaaaaaaaaaaaaaaaaaaaaaaaa

SEQ ID NO: 24 - DNA, 740 bp, Homo sapiens
ggaccccagacatgaggaggctcctcctggtcaccagcctggtggttgtgctgctgtgggaggcaggtgcagtcccagcacccaaggtccctatcaagatgcaagtcaaacactggccctcagagcaggacccagagaaggcctggggcgcccgtgtggtggagcctccggagaaggacgaccagctggtggtgctgttccctgtccagaagccgaaactcttgaccaccgaggagaagccacgaggtcagggcaggggccccatccttccaggcaccaaggcctggatggagaccgaggacaccctgggccgtgtcctgagtcccgagcccgaccatgacagcctgtaccaccctccgcctgaggaggaccagggcgaggagaggccccggttgtgggtgatgccaaatcaccaggtgctcctgggaccggaggaagaccaagaccacatctaccacccccagtagggctccaggggccatcactgcccccgccctgtcccaaggcccaggctgttgggactgggaccctccctaccctgccccagctagacaaataaaccccagcaggccgggcgcggtggctcacctctgtaatcccagcacttttagaggccgaggcaggcggatcacctgaaatcaggagttccagaccagcctgggcaacatggtgaaaccccgtctctactaaaaatacaaaaattagccgggaaaaaaaaaaaaaaaaaaaaaaaaaaaaaa

SEQ ID NO: 25 - DNA, 1377 bp, Homo sapiens
ccaacgcgcaggcgccgctgctatgctgagtgccgcgtctcgcgtagtctcccgcgccgccgtccactgcgcgcttcgctctccgccgcccgaggcccgcgcgctcgccatgtcccggccaccgccaccgcgggtcgcctcggtgctgggcaccatggagatggggcgccgcatggacgcgcccgccagcgccgcggccgtgcgcgcctttctggagcgcggccacaccgaactggacacggccttcatgtacagcgacggccagtccgagaccatcctgggcggcctggggctcgggctgggcggtggcgactgcagagtgaaaattgccaccaaggccaacccttgggatggaaaatcactaaagcctgacagtgtccggtcccagctggagacgtcattgaagaggctgcagtgtccccaagtggacctcttctacctacacgcacctgaccacggcaccccggtggaagagacgctgcatgcctgccagcggctgcaccaggagggcaagttcgtggagcttggcctctccaactatgctagctgggaagtggccgagatctgtaccctctgcaagagcaatggctggatcctgcccactgtgtaccagggcatgtacaacgccaccacccggcaggtggaaacggagctcttcccctgcctcaggcactttggactgaggttctatgcctacaaccctctggctgggggcctgctgactggcaagtacaagtatgaggacaaggacgggaaacagcctgtgggccgcttctttgggaatagctgggctgagacctacaggaatcgcttctggaaggagcaccacttcgaggccattgcgttggtggagaaggccctgcaggccgcatatggcgccagcgcccccagtgtgacctcggctgccctccggtggatgtaccaccactcacagctgcagggtgcccacggggacgcggtcatcctgggcatgtccagcctggagcagctggagcagaacttggcagcaacagaggaagggcccctggagccggctgtcgtggatgcctttaatcaagcctggcatttggttgctcacgaatgtcccaactacttccgctaggcccatcatggctcaggctgcccaaggcttttctgtcacctcttttgttctctcacactgaccagtcttggccttaagctgacttagaagggtttttctgaattgtctagatccatgcattatttttctagcttcctgccttgctccctattcactttacactgtgaaaggtggggggtgagtcccacttgagcgcttcctgttgaataaagcaggcacttgacctggctgtagcctaggtcttgagtgaaccccaaaaaaaaaaaaaaaaaaaa

SEQ ID NO: 26 - DNA, 1023 bp, Homo sapiens
ggtccgacattcgtagcagcagctgccccccaagcatcagtgtacccagcccagtgactgacgtggagccctgggcttcgcgtagagtcacctagacggggcgaaaacgggaaaaggggccttaactggggcacctggctcctttgagagctcggagtttctgactggactgcgcaacaccccagaggcaaggtgaacgcgagggcctataatgcaagaaccaaggcgagtcacgcactgtctgggcaaaagaggagtaaagacccctcagctgcagcccggcagcgcattcctacccagggtccgccgccagagctttaccgcgcggtcggatagttacactactgtccgggacttcctagccgtgccgcggaccatctcaagtgcttccgccacactcatcatggcggtggcagtaagtcacttccgcccgggaccggaagtgtgggatactgcgagtatggcggcgtcaaaggtgaagcaggacatgcctccgccggggggctatgggcccatcgactacaaacggaacttgccgcgtcgaggactgtcgggctacagcatgctggccatagggattggaaccctgatctacgggcactggagcataatgaagtggaaccgtgagcgcaggcgcctacaaatcgaggacttcgaggctcgcatcgcgctgttgccactgttacaggcagaaaccgaccggaggaccttgcagatgcttcgggagaacctggaggaggaggccatcatcatgaaggacgtgcccgactggaaggtgggggagtctgtgttccacacaacccgctgggtgccccccttgatcggggagctgtacgggctgcgcaccacagaggaggctctccatgccagccacggcttcatgtggtacacgtaggccctgtgccctccggccacctggatccctgcccctccccactgggacggaataaatgctctgcagacctggaaaaaaaaaaaaaaaaaaaaaaaaaaaaaaaaaaaaaaaaaaaaaaaaaaaaaaaa

SEQ ID NO: 27 - DNA, 576 bp, Homo sapiens
ctccgccccctcccactctctctttccggtgtggagtctggagacgacgtgcagaaatggcacctcgaaaggggaaggaaaagaaggaagaacaggtcatcagcctcggacctcaggtggctgaaggagagaatgtatttggtgtctgccatatctttgcatccttcaatgacacttttgtccatgtcactgatctttctggcaaggaaaccatctgccgtgtgactggtgggatgaaggtaaaggcagaccgagatgaatcctcaccatatgctgctatgttggctgcccaggatgtggcccagaggtgcaaggagctgggtatcaccgccctacacatcaaactccgggccacaggaggaaataggaccaagacccctggacctggggcccagtcggccctcagagcccttgcccgctcgggtatgaagatcgggcggattgaggatgtcacccccatcccctctgacagcactcgcaggaaggggggtcgccgtggtcgccgtctgtgaacaagattcctcaaaatattttctgttaataaattgccttcatgtaaactgtttcaaaaaaaaa

SEQ ID NO: 28 - DNA, 1098 bp, Homo sapiens
tgggcggaagaggtggccccggatgctgcggcgcccgctggccgggctggctgcggccgccctgggccgggccccaccggacggcttgctctgctctttacctggggttgctgtcgaggaccctgtgcaagactcggccggtttttctttctccctgatggacagacccaaacatagccgcgcagcatcgtgaagggctggggccttcactcctctgtggctctggaagagcccgatttcctcaggaggcatgtcgggccccaggcctgtggtgctgagcgggccttcgggagctgggaagagcaccctgctgaagaggctgctccaggagcacagcggcatctttggcttcagcgtgtcccataccacgaggaacccgaggcccggcgaggagaacggcaaagattactactttgtaaccagggaggtgatgcagcgtgacatagcagccggcgacttcatcgagcatgccgagttctcggggaacctgtatggcacgagcaaggtggcggtgcaggccgtgcaggccatgaaccgcatctgtgtgctggacgtggacctgcagggtgtgcggaacatcaaggccaccgatctgcggcccatctacatctctgtgcagccgccttcactgcacgtgctggagcagcggctgcggcagcgcaacactgaaaccgaggagagcctggtgaagcggctggctgctgcccaggccgacatggagagcagcaaggagcccggcctgtttgatgtggtcatcattaacgacagcctggaccaggcctacgcagagctgaaggaggcgctctctgaggaaatcaagaaagctcaaaggaccggcgcctgaggcttgctgtctgttctcggcaccccgggcccatacaggaccagggcagcagcattgagccacccccttggcaggcgatacggcagctctgtgcccttggccagcatgtggagtggaggagatgctgcccctgtggttggaacatcctggggtgacccccgacccagcctcgctgggctgtcccctgtccctatctctcactctggacccagggctgacatcctaataaaataactgttggattagaaactcca

SEQ ID NO: 29 - DNA, 5662 bp, Homo sapiens
ggtcgccggccagcgtgaaccgggacatggagccgcccggcgggagcctggggcccggccgcgggacccgggacaagaagaagggccggagcccagatgagctgccctcggcgggcggcgacggcggcaaatctaagaaatttctggagagatttaccagcatgagaattaagaaggagaaggaaaagcccaattctgctcatagaaattcttctgcatcatatggggatgatcccacagcacagtcattgcaagatgtttcagatgaacaagtgctggttctctttgaacagatgctgctggatatgaacctgaatgaggagaaacagcaacctttgagggagaaggacatcatcatcaagagggagatggtgtcccaatacttgtacacctccaaggctggcatgagccagaaggagagctctaagtctgccatgatgtatattcaggagttgaggtcaggcttgcgggatatgcctctgctcagctgcctggagtcccttcgtgtgtctctcaacaacaaccctgtcagttgggtgcaaacatttggtgctgaaggcttggcctccttattggacattcttaaacgacttcatgatgagaaagaagagactgctgggagttacgatagccggaacaagcatgagatcattcgctgcttgaaagcttttatgaacaacaagtttggaatcaagaccatgttggagacagaagaaggaatcctactgctggtcagagccatggatcctgctgttcccaacatgatgattgatgcagctaagctgctttctgctctttgtattctaccgcagccagaggacatgaatgaaagggttttggaggcaatgacagaaagagctgagatggatgaagtggaacgtttccagccgctgctggatggattaaaaagtggaaccactattgcactgaaggttggatgcctacagctgatcaatgctctcatcacaccagcggaggaacttgacttccgagttcacatcagaagtgaactgatgcgtttggggctacatcaggtgttgcaggaccttcgagagattgaaaatgaagatatgagagtgcaactaaatgtgtttgatgaacaaggggaagaggattcctatgacctgaagggacggctggatgacattcgcatggagatggatgactttaatgaagtctttcagattctcttaaacacagtgaaggattcaaaggcagagccacacttcctttccatcctgcagcacttactcttggtccgaaatgactatgaggccagacctcagtactataagttgattgaagaatgtatttcccagatagttctgcacaagaacggggctgatcctgacttcaagtgccggcacctccagattgagattgagggattaattgatcaaatgattgataagacaaaggtggagaaatctgaagccaaagctgcagagctggaaaagaagttggactcagagttaacagcccgacatgagctacaggtggaaatgaaaaagatggaaagtgactttgagcagaagcttcaagatcttcagggagaaaaagatgcactgcattctgaaaagcagcaaattgccacagagaaacaggacctggaagcagaggtgtcccagctcacaggagaggttgccaagctgacaaaggaactggaagatgccaagaaagaaatggcttccctctctgcggcagctattactgtacctccttctgttcctagtcgtgctcctgttccccctgcccctcctttacctggtgactctggcactattattccaccaccacctgctcctggggatagtaccactcctcctcctcctcctcctcctcctcctcctccacctcctttacctggaggtactgctatctctccaccccctcctttgtctggggatgctaccatccctccaccccctcctttgcctgagggtgttggcatcccttcaccctcttctttgcctggaggtactgccatccccccacctcctcctttgcctgggagtgctagaatccccccaccaccacctcctttgcctgggagtgctggaattccccccccacctcctcccttgcctggagaagcaggaatgccacctcctcctccccctcttcctggtggtcctggaatccctccacctcctccatttcccggaggccctggcattcctccacctccacccggaatgggtatgcctccacctcccccatttggatttggagttcctgcagccccagttctgccatttggattaacccccaaaaagctttataagccagaggtgcagctccggaggccaaactggtccaagcttgtggctgaggacctctcccaggactgcttctggacaaaggtgaaggaggaccgctttgagaacaatgaacttttcgccaaacttacccttaccttctctgcccagaccaagaccaagaaggatcaagaaggtggagaagaaaagaaatctgtgcaaaagaaaaaagtaaaagagttaaaggtgttggattcaaagacagcccagaatctctcaatctttttgggttccttccgcatgccctatcaagagattaagaatgtcatcctggaggtgaatgaggctgttctgactgagtctatgatccagaacctcattaagcaaatgccagagccagagcagttaaaaatgctttctgaactgaaggatgaatatgatgacctggctgagtcagagcagtttggcgtggtgatgggcactgtgccccgactgcggcctcgcctcaatgccattctcttcaagctacaattcagcgagcaagtggagaatatcaagccagagattgtgtctgtcactgctgcatgtgaggagttacgtaagagtgagagcttttccaatctcctagagattaccttgcttgttggaaattacatgaatgctggctccagaaatgctggtgcttttggcttcaatatcagcttcctctgtaagcttcgagacaccaagtccacagatcagaagatgacgttgttacacttcttggctgagttgtgtgagaatgactatcccgatgtcctcaagtttccagacgagcttgcccatgtggagaaagccagccgagtttctgctgaaaacttgcaaaagaacctagatcagatgaagaaacaaatttctgatgtggaacgtgatgttcagaatttcccagctgccacagatgaaaaagacaagtttgttgaaaaaatgaccagctttgtgaaggatgcacaggaacagtataacaagctgcggatgatgcattctaacatggagaccctctataaggagctgggcgagtacttcctctttgaccccaagaagttgtctgttgaagaatttttcatggatcttcacaattttcggaatatgtttttgcaagcagtcaaggagaaccagaagcggcgggagacagaagaaaagatgaggcgagcaaaactagccaaggagaaggcagagaaggagcggctagagaagcagcagaagagagagcaactcatagacatgaatgcagagggcgatgagacaggtgtgatggacagtcttctagaagccctgcagtcaggggcagcattccgacggaagagagggccccgtcaagccaacaggaaggccgggtgtgcagtcacatctctgctagcttcggagctgaccaaggatgatgccatggctgctgttcctgccaaggtgtccaagaacagtgagacattccccacaatccttgaggaagccaaggagttggttggccgtgcaagctaatgtgggtcctgtgaccgcggcagctcctcagcggagccgcagactgtcctgccctgcagcatgtgcctaaaggctcaaggggatattcctctggggtggccactcccaccaccctgaccctgtctttctctctggcctgctgctctctcaacatcacatacagcttcagctgcctggaggccagaaggaaagggcagtgcaggggaggcctgagcccgacttagccagccctggctgttgtattaccaaagcagggtccatgtttgctgccttaaccctgtctcctctctgttactcagagggcctcatctcagacaaggcccagcctgctttttctcagccctgactttctaatgggctttcccccctaggtcagtcttgctggatttgtgcttttcttttgtggtttctctggccctgagaatagcatggggcttgtaaacctttgggctagatccctcctttcattgctgttgtctctgctcttccctctcctggctgtggttatttattattagtggtgtggcactgggagctgctcctaaggaagcagggagcaaatcccacctttaccccaccttcctgggaaaggcctccaaagcaaaggatctggaccagtttccctgctgtgctgtggcccaggccagagcctgtgggcaggcaggcagggcatagcgacagtgtgggacctgcccccagcttctgccacgctttatgcccttgcctctctggacgctctgcaccaaccccaggctactgagccaccttccctcctcatgccttccctgagctttggtgcatctcatctggactatgggttgtactgtgaccatcccaacacctcaccctctgtctacaaggaaatgggaggtggagggttgtactgtgaccatcccaacacctcaccctctgtctacaaggaaatgggaggtggagcctcctggctgagaaattgttttgcaaatggatctatttttgtatgaaaaaaaaaatttttttaaagaaaactgttccttccccctttcccctccataatgtaagaagctttggtggcaggttacagagttctgggatttcttctcacaggcccaatcctgaatgtgcccctggaccttctggacccttgagtccaaggcagatcctctctcccagggaatccgacacaggaggaaccccttctctggttgagctgggccaggcctaagagtagcaggaactctaagaccacagagttttttataaatgtataaatgtatcaagccaaatgtgcagatgctaactggacattctggggaactgggcaccaggagtgccttcatacactgtaccccagctctcttctaaaagagaagtgggtgggcacactgaactgtttggtggccccaaccacaggaagctgcaattctctggcttagggtgatacttttgccctccttgtgcccctctcagctttccatccccagctaggaagaaagaatggcactcttgggcttggcccagaattagagttattagagcaagagagagcttaggaagcatgagggcaactatagtgaggccttattgccaggagggagggttttggttgctggcgcttgtgtataaaggggcaagagcagctcctttggactattcctgggaggactctgatgcagggcgtctgttgctcccctgggtcacctcctccctgctcgctgacatctggggctttgaccctttcttttttaatctacttttgctaagatgcatttaataaaaaaaaagagagagagagagaggtgtgagggacaaaatgcaaacctatttcccttgcctcataggcttctgggatgtcatcacctccagtttgttggttttgtttccaactgttaataaagcattgaaacagt

SEQ ID NO: 30 - DNA, 885 bp, Homo sapiens
ggcccgggaaaggaccagaacaggcggcgaagactgaagcccggaggtaggagtggcaagagctcgcccagtccgcgaagggtaaactcgcgcatgcgcactggccttcaaccaagccaagcgccttggcttctgtcctggatgctcagtgttttgcggtttacgatgcgcatcgttttcccggctctggcaccagatccatactattctgtaaactgaggcggcgatgcccaaaaattggaagcaattactctaagatatcaaaagattgaagcaagccatgaaacctctgcgcggagagagccgagcccgaggcggcggggagccagcacgtgtgcgcagctccgccctcttttggcgaagcacctaggcctggcccctcccgcgacctgtagcgcggcggagcaagcgcggaaggctgggagggctgcgcgggctgcgcgtcgccatggagcccgacgggacttacgagccgggcttcgtgggtattcgcttctgccaggaatgtaacaacatgctgtaccccaaggaagacaaggagaaccgcattctgctctacgcgtgccggaactgtgattaccagcaggaggccgacaacagctgcatctatgtcaacaagatcacgcacgaagtggacgaactgacccagattatcgccgacgtgtcccaggaccccacgttgccgcggaccgaggaccacccgtgccaaaagtgcggccacaaggaggctgtgttcttccagtcacacagtgcgcgggccgaggacgccatgcgcctttactacgtgtgcacagccccacactgcggccaccgctggaccgagtgacctcctctctcccccgagtgtaataaacaccagattccatgcgtgaaaaaaaaaaaaaa

SEQ ID NO: 31 - DNA, 765 bp, Homo sapiens
atgacgccgcggaggcggccccgtccccgcgctcccgcccctcccgccagggcagcccgggaggccagacgttgacgctgcagggagagggtggtgggcgcagccgctagggggcgcggcggggcggagcgcacctttccgcgggccgcggggatggcggcgcagggcgtagggcctgggccggggtcggcggcgcccccggggctggaggcggcccggcagaagctggcgctgcggcggaagaaggtgctgagcaccgaggagatggagctgtacgagctggcgcaggcggcgggcggcgctatcgaccccgacgtgttcaagatcctggtggacctgctgaagctgaacgtggcccccctcgccgtcttccagatgctcaagtccatgtgtgccgggcagaggctagcgagcgagccccaggaccctgcggccgtgtctctgcccacgtcgagcgtgcccgagacccgagggagaaacaaaggcagcgctgccctcgggggagcattggccctggcggaacgcagcagccgcgaaggatccagccagaggatgccacgccagcccagcgctaccaggctgcccaaggggggcgggcctgggaagagccctacacggggcagcacctaggatggggcagagacttgttgcatctttgtccccagcaaaggctacatgttacctccttcaattgataataaacctttctgagatgcagagggtccaggtcaaaaaaaaaaaaaaaaaaaaaaaaaaaaaaaaaaa

SEQ ID NO: 32 - DNA, 972 bp, Homo sapiens
aagccccagacggtatctcctggatgccagtgagcggctgagagctgaagctccctggacactcaaggctcttgtggtgacagtctgacgtaaaggcgtgcagggaggcctagctctgtctcctggacttagagatttcagacacagaagtctgtccatggctccttgtcacatccgcaaataccaggagagcgaccgccagtgggttgtgggcttgctctcccgggggatggccgagcatgccccagccaccttccggcaattgctgaagctgcctcgaaccctcatactcttacttggggggcccctcgccctactcctggtctctggatcctggcttctagccctcgtgttcagcatcagcctcttccctgccctgtggttccttgccaaaaaaccctggacggagtatgtggacatgacattgtgcacagacatgtctgacattaccaaatcctacctgagtgagcgtggctcctgcttctgggtggctgagtctgaagagaaggtggtgggcatggtaggagctctgcctgttgatgatcccaccttgagggagaagcggttgcagctgtttcatctctctgtggacagtgagcaccgtcgtcaggggatagcaaaagccctggtcaggactgtcctccagtttgcccgggaccagggctacagtgaagttatcctggacaccggcaccatccagctctctgctatggccctctaccagagcatgggcttcaagaagacgggccagtccttcttctgtgtgtgggccaggctagtggctcttcatacagttcatttcatctaccacctcccttcttctaaggtagggagtctgtgatctctttctgtgtgtattggtcagaatagaatccattcagctgtagcagcaagcaatccccaacctttcactgcaatgacctttcaatgcaataaaagcttattgtccattcaaaaaaaaaaaaaaaaaaa

SEQ ID NO: 33 - DNA, 847 bp, Homo sapiens
acagcgagcggagccgcggtccggacggcagcgcgtgccccgagctctccgcctccccccgcccgccagccgaggcagctcgagcccagtccgcggccccagcagcagcgccgagagcagccccagtagcagcgccatggccgggtggaacgcctacatcgacaacctcatggcggacgggacctgtcaggacgcggccatcgtgggctacaaggactcgccctccgtctgggccgccgtccccgggaaaacgttcgtcaacatcacgccagctgaggtgggtgtcctggttggcaaagaccggtcaagtttttacgtgaatgggctgacacttgggggccagaaatgttcggtgatccgggactcactgctgcaggatggggaatttagcatggatcttcgtaccaagagcaccggtggggcccccaccttcaatgtcactgtcaccaagactgacaagacgctagtcctgctgatgggcaaagaaggtgtccacggtggtttgatcaacaagaaatgttatgaaatggcctcccaccttcggcgttcccagtactgacctcgtctgtcccttccccttcaccgctccccacagctttgcacccctttcctccccatacacacacaaaccattttattttttgggccattaccccataccccttattgctgccaaaaccacatgggctgggggccagggctggatggacagacacctccccctacccatatccctcccgtgtgtggttggaaaacttttgttttttggggttttttttttctgaataaaaaagattctactaacaaaaaaaaaaaaaaaaaaaaaaaaaaaaaaaaaaaaaaaaaa

SEQ ID NO: 34 - DNA, 2566 bp, Homo sapiens
cgtcgccgtccccgtctcctgccaggcgcggagccctgcgagccgcgggtgggccccaggcgcgcagacatgggctgctccgccaaagcgcgctgggctgccggggcgctgggcgtcgcggggctactgtgcgctgtgctgggcgctgtcatgatcgtgatggtgccgtcgctcatcaagcagcaggtccttaagaacgtgcgcatcgaccccagtagcctgtccttcaacatgtggaaggagatccctatccccttctatctctccgtctacttctttgacgtcatgaaccccagcgagatcctgaagggcgagaagccgcaggtgcgggagcgcgggccctacgtgtacagggagtccaggcacaaaagcaacatcaccttcaacaacaacgacaccgtgtccttcctcgagtaccgcaccttccagttccagccctccaagtcccacggctcggagagcgactacatcgtcatgcccaacatcctggtcttgggtgcggcggtgatgatggagaataagcccatgaccctgaagctcatcatgaccttggcattcaccaccctcggcgaacgtgccttcatgaaccgcactgtgggtgagatcatgtggggctacaaggacccccttgtgaatctcatcaacaagtactttccaggcatgttccccttcaaggacaagttcggattatttgctgagctcaacaactccgactctgggctcttcacggtgttcacgggggtccagaacatcagcaggatccacctcgtggacaagtggaacgggctgagcaaggttgacttctggcattccgatcagtgcaacatgatcaatggaacttctgggcaaatgtggccgcccttcatgactcctgagtcctcgctggagttctacagcccggaggcctgccgatccatgaagctaatgtacaaggagtcaggggtgtttgaaggcatccccacctatcgcttcgtggctcccaaaaccctgtttgccaacgggtccatctacccacccaacgaaggcttctgcccgtgcctggagtctggaattcagaacgtcagcacctgcaggttcagtgcccccttgtttctctcccatcctcacttcctcaacgccgacccggttctggcagaagcggtgactggcctgcaccctaaccaggaggcacactccttgttcctggacatccacccggtcacgggaatccccatgaactgctctgtgaaactgcagctgagcctctacatgaaatctgtcgcaggcattggacaaactgggaagattgagcctgtggtcctgccgctgctctggtttgcagagagcggggccatggagggggagactcttcacacattctacactcagctggtgttgatgcccaaggtgatgcactatgcccagtacgtcctcctggcgctgggctgcgtcctgctgctggtccctgtcatctgccaaatccggagccaagagaaatgctatttattttggagtagtagtaaaaagggctcaaaggataaggaggccattcaggcctattctgaatccctgatgacatcagctcccaagggctctgtgctgcaggaagcaaaactgtagggtcctgaggacaccgtgagccagccaggcctggccgctgggcctgaccggccccccagcccctacaccccgcttctcccggactctcccagcagacagccccccagccccacagcctgagcctcccagctgccatgtgcctgttgcacacctgcacacacgccctggcacacatacacacatgcgtgcaggcttgtgcagacactcagggatggagctgctgctgaagggacttgtagggagaggctcgtcaacaagcactgttctggaaccttctctccacgtggcccacaggctgaccacaggggctgtgggtcctgcgtccccttcctcgggtgagcctggcctgtcccgttcagccgttgggccaggcttcctcccctccaaggtgaaacactgcagtcccggtgtggtggctccccatgcaggacgggccaggctgggagtgccgccttcctgtgccaaattcagtggggactcagtgcccaggccctggcacgagctttggccttggtctacctgccaggccaggcaaagcgcctttacacaggcctcggaaaacaatggagtgagcacaagatgccctgtgcagctgcccgagggtctccgcccaccccggccggactttgatccccccgaagtcttcacaggcactgcatcgggttgtctggcgcccttttcctccagcctaaactgacatcatcctatggactgagccggccactctctggccgaagtggcgcaggctgtgcccccgagctgcccccaccccctcacagggtccctcagattataggtgcccaggctgaggtgaagaggcctgggggccctgccttccgggcgctcctggaccctggggcaaacctgtgacccttttctactggaatagaaatgagttttatcatctttgaaaaataattcactcttgaagtaataaacgtttaaaaaaatggaaaaaaaaaaaaaa

SEQ ID NO: 35 - DNA, 1073 bp, Homo sapiens
cggagccagcgtgggaggccgctgccgtcgcgcgccttggtttttctgttccttttttttttttttttttaacttcctgcctatcacacgcagccatcagcccacaaagacatgactaccaacgcgggccccttgcacccatactggcctcagcacctaagactggacaactttgtacctaatgaccgccccacctggcatatactggctggcctcttctctgtcacaggggtcttagtcgtgaccacatggctgttgtcaggtcgtgctgcggttgtcccattggggacttggcggcgactgtccctgtgctggtttgcagtgtgtgggttcattcacctggtgatcgagggctggttcgttctctactacgaagacctgcttggagaccaagccttcttatctcaactctggaaagagtatgccaagggagacagccgatacatcctgggtgacaacttcacagtgtgcatggaaaccatcacagcttgcctgtggggaccactcagcctgtgggtggtgatcgcctttctccgccagcatcccctccgcttcattctacagcttgtggtctctgtgggccagatctatggggatgtgctctacttcctgacagagcaccgcgacggattccagcacggagagctgggccaccctctctacttctggttttactttgtcttcatgaatgccctgtggctggtgctgcctggagtccttgtgcttgatgctgtgaagcacctcactcatgcccagagcacgctggatgccaaggccacaaaagccaagagcaagaagaactgaggagtggtggaccaggctcgaacactggccgaggaggagctctctgcctgccagaagagtctagtcctgctcccacagtttggagggacaaagctaattgatctgtcacactcaggctcatgggcaggcacaagaaggggaataaaggggctgtgtgaaggcactgctgggagccattagaacacagatacaagagaagccaggaggtctatgatggtgacgatttttaaaatcaggaaataaaagatcttgactctaaaaaaaaaaaa

SEQ ID NO: 36 - DNA, 1497 bp, Homo sapiens
atggaactgttgacattcagggatgtgaccatagaattctctctggaggagtgggagtttctgaaccctgctcagcagagtttgtataggaaagtgatgctagagaactacagaaacctggtctctctgggtcttactgtttctaagccagaactgattagccgtctggagcaaagacaggagccctggaatgtgaagagacatgagaccatagccaaacccccagctatgtcttctcattacactgaagaccttttgccagaacagtgcatgcaagattcattccaaaaagtgatactgagaagatatggaagctgtggacttgaggatttacacttaaggaaggatggggaaaatgtgggtgagtgtaaggatcaaaaagaaatttataatggacttaaccaatgtttgtcaactctacctagcaaaattttcccatataataaatgtgtgaaagtctttagtaaatcatcaaatctaaatagagaaaacataagacatactacagagaaacttttcaaatgtatgcaatgtggcaaagtctttaaatctcactcaggcctttcttatcataagataattcacactgaagagaaactctgcatatgtgaggaatgtggcaaaacctttaagtggttctcataccttactaaacataagagaattcacactggagagaaaccatacaaatgtgaagaatgtggcaaagcttttaactggtgctcgagtcttactaaacataagagaatccatactggtgagaaaccctacaaatgtgaagaatgtggaaaagcctttcactggtgttcaccctttgttagacataagaaaattcatacaggagaaaaaccctatacatgtgaagactgtggcagagcgtttaaccggcactcacatctcaccaaacataagacaattcacactggaaagaaaccctacaaatgtaaagaatgtgggaaagcctttaaccactgctcactacttactatacatgagagaacccatacgggagagaaaccctataaatgtgaagaatgtggcaaagcttttaactcatcatcaattcttactgaacataaggtaattcatagcggagagaaaccctacaaatgtgaaaaatgtgacaaagtctttaagaggttctcataccttactaaacacaagagaattcacactggagagaaaccctacaaatgtgaagaatgtggcaaagcttttaactggtcctcaatccttactgaacataagagaattcatactggagagaaaccctacaactgtgaagaatgtggaaaagcctttaatcggtgctcacaccttactagacataagaaaattcatactgccgtcaaacgctataaatgtgaagaatgtggcaaagcttttaaacggtgctcacatcttaatgaacataagagagttcaaagaggagagaaatcctgcaagtataaaaaatgtggggaagcttttaatcactgctcaaaccttactacgtaa

SEQ ID NO: 37 - DNA, 1695 bp, Homo sapiens
gttgccgctgcgcacctggctcaggtgagctgccccgcccccgcccggcgcgagccccaggtcctggcagcagcccctgacctgtccaggtgccctgtccagctgactgcaaggacagagaggagtcctgcccagctcttggatcagtctgctggccgaggagcccggtggagccaggggtgaccctggagcccagcctgccccgaggaggccccggctcagagccatgccaggtgtctgtgatagggcccctgacttcctctccccgtctgaagaccaggtgctgaggcctgccttgggcagctcagtggctctgaactgcacggcttgggtagtctctgggccccactgctccctgccttcagtccagtggctgaaagacgggcttccattgggaattgggggccactacagcctccacgagtactcctgggtcaaggccaacctgtcagaggtgcttgtgtccagtgtcctgggggtcaacgtgaccagcactgaagtctatggggccttcacctgctccatccagaacatcagcttctcctccttcactcttcagagagctggccctacaagccacgtggctgcggtgctggcctccctcctggtcctgctggccctgctgctggccgccctgctctatgtcaagtgccgtctcaacgtgctgctctggtaccaggacgcgtatggggaggtggagataaacgacgggaagctctacgacgcctacgtctcctacagcgactgccccgaggaccgcaagttcgtgaacttcatcctaaagccgcagctggagcggcgtcggggctacaagctcttcctggacgaccgcgacctcctgccgcgcgctgagccctccgccgacctcttggtgaacctgagccgctgccgacgcctcatcgtggtgctttcggacgccttcctgagccgggcctggtgcagccacagcttccgggagggcctgtgccggctgctggagctcacccgcagacccatcttcatcaccttcgagggccagaggcgcgaccccgcgcacccggcgctccgcctgctgcgccagcaccgccacctggtgaccttgctgctctggaggcccggctccgtgactccttcctccgatttttggaaagaagtgcagctggcgctgccgcggaaggtgcggtacaggccggtggaaggagacccccagacgcagctgcaggacgacaaggaccccatgctgattcttcgaggccgagtccctgagggccgggccctggactcagaggtggacccggaccctgagggcgacctgggtgtccgggggcctgtttttggagagccatcagctccaccgcacaccagtggggtctcgctgggagagagccggagcagcgaagtggacgtctcggatctcggctcgcgaaactacagtgcccgcacagacttctactgcctggtgtccaaggatgatatgtagctcccaccccagagtgcaggatcatagggacagcgggggccagggcagcggcgtcgctcctctgctcaacaggaccacaacccctgccagcagccctgggaccctgccagcagccctgggaaaaggctgtggcctcagggcgcctcccagtgccagaaaataaagtccttttggattctgaaaaaaaaaaaaaaaaaaaaaaaaaaaaaaaaaaaaaaaaaaaaaaaaaaaaaaaa

SEQ ID NO: 38 - DNA, 1345 bp, Homo sapiens
ggaacaggatgcccctgtcccgctggttgagatctgtgggggtcttcctgctgccagccccctactgggcaccccgggagaggtggctgggttccctacggcggccctccctggtgcacgggtacccagtcctggcctggcacagtgcccgctgctggtgccaagcgtggacagaggaacctcgagccctttgctcctccctcagaatgaacggagaccagaattcagatgtttatgcccaagaaaagcaggatttcgttcagcacttctcccagatcgttagggtgctgactgaggatgagatggggcacccagagataggagatgctattgcccggctcaaggaggtcctggagtacaatgccattggaggcaagtataaccggggtttgacggtggtagtagcattccgggagctggtggagccaaggaaacaggatgctgatagtctccagcgggcctggactgtgggctggtgtgtggaactgctgcaagctttcttcctggtggcagatgacatcatggattcatcccttacccgccggggacagatctgctggtatcagaagccgggcgtgggtttggatgccatcaatgatgctaacctcctggaagcatgtatctaccgcctgctgaagctctattgccgggagcagccctattacctgaacctgatcgagctcttcctgcagagttcctatcagactgagattgggcagaccctggacctcctcacagccccccagggcaatgtggatcttgtcagattcactgaaaagaggtacaaatctattgtcaagtacaagacagctttctactccttctaccttcctatagctgcagccatgtacatggcaggaattgatggcgagaaggagcacgccaatgccaagaagatcctgctggagatgggggagttctttcagattcaggatgattaccttgacctctttggggaccccagtgtgaccggcaaaattggcactgacatccaggacaacaaatgcagctggctggtggttcagtgtctgcaacgggccactccagaacagtaccagatcctgaaggaaaattacgggcagaaggaggctgagaaagtggcccgggtgaaggcgctatatgaggagctggatctgccagcagtgttcttgcaatatgaggaagacagttacagccacattatggctctcattgaacagtacgcagcacccctgcccccagccgtctttctggggcttgcgcgcaaaatctacaagcggagaaagtgacctagagattgcaagggcggggagaggaggctctcaataaataatcgtgtaaccttaaaaaaaaaaaaaaaaaaaaa

SEQ ID NO: 39 - DNA, 3309 bp, Homo sapiens
ttcagcccctctcccgggctgcgcctccgcactccgggcccgggcagaagggggtgcgcctcggccccaccacccagggagcagccgagctgaaaggccgggaaccgcggcttgcggggaccacagctcccgaaagcgacgttcggccaccggaggagcgggagccaagcaggcggagctcggcgggagaggtgcgggccgaatccgagccgagcggagaggaatccggcagtagagagcggactccagccggcggaccctgcagccctcgcctgggacagcggcgcgctgggcaggcgcccaagagagcatcgagcagcggaacccgcgaagccggcccgcagccgcgacccgcgcagcctgccgctctcccgccgccggtccgggcagcatgaggcgcgcggcgctctggctctggctgtgcgcgctggcgctgagcctgcagccggccctgccgcaaattgtggctactaatttgccccctgaagatcaagatggctctggggatgactctgacaacttctccggctcaggtgcaggtgctttgcaagatatcaccttgtcacagcagaccccctccacttggaaggacacgcagctcctgacggctattcccacgtctccagaacccaccggcctggaggctacagctgcctccacctccaccctgccggctggagaggggcccaaggagggagaggctgtagtcctgccagaagtggagcctggcctcaccgcccgggagcaggaggccaccccccgacccagggagaccacacagctcccgaccactcatcaggcctcaacgaccacagccaccacggcccaggagcccgccacctcccacccccacagggacatgcagcctggccaccatgagacctcaacccctgcaggacccagccaagctgaccttcacactccccacacagaggatggaggtccttctgccaccgagagggctgctgaggatggagcctccagtcagctcccagcagcagagggctctggggagcaggacttcacctttgaaacctcgggggagaatacggctgtagtggccgtggagcctgaccgccggaaccagtccccagtggatcagggggccacgggggcctcacagggcctcctggacaggaaagaggtgctgggaggggtcattgccggaggcctcgtggggctcatctttgctgtgtgcctggtgggtttcatgctgtaccgcatgaagaagaaggacgaaggcagctactccttggaggagccgaaacaagccaacggcggggcctaccagaagcccaccaaacaggaggaattctatgcctgacgcgggagccatgcgccccctccgccctgccactcactaggcccccacttgcctcttccttgaagaactgcaggccctggcctcccctgccaccaggccacctccccagcattccagcccctctggtcgctcctgcccacggagtcgtggggtgtgctgggagctccactctgcttctctgacttctgcctggagacttagggcaccaggggtttctcgcataggacctttccaccacagccagcacctggcatcgcaccattctgactcggtttctccaaactgaagcagcctctccccaggtccagctctggaggggagggggatccgactgctttggacctaaatggcctcatgtggctggaagatcctgcgggtggggcttggggctcacacacctgtagcacttactggtaggaccaagcatcttgggggggtggccgctgagtggcaggggacaggagtccactttgtttcgtggggaggtctaatctagatatcgacttgtttttgcacatgtttcctctagttctttgttcatagcccagtagaccttgttacttctgaggtaagttaagtaagttgattcggtatccccccatcttgcttccctaatctatggtcgggagacagcatcagggttaagaagactttttttttttttttttaaactaggagaaccaaatctggaagccaaaatgtaggcttagtttgtgtgttgtctcttgagtttgtcgctcatgtgtgcaacagggtatggactatctgtctggtggccccgtttctggtggtctgttggcaggctggccagtccaggctgccgtggggccgccgcctctttcaagcagtcgtgcctgtgtccatgcgctcagggccatgctgaggcctgggccgctgccacgttggagaagcccgtgtgagaagtgaatgctgggactcagccttcagacagagaggactgtagggagggcggcaggggcctggagatcctcctgcagaccacgcccgtcctgcctgtggcgccgtctccaggggctgcttcctcctggaaattgacgaggggtgtcttgggcagagctggctctgagcgcctccatccaaggccaggttctccgttagctcctgtggccccaccctgggccctgggctggaatcaggaatattttccaaagagtgatagtcttttgcttttggcaaaactctacttaatccaatgggtttttccctgtacagtagattttccaaatgtaataaactttaatataaagtagtcctgtgaatgccactgccttcgcttcttgcctctgtgctgtgtgtgacgtgaccggacttttctgcaaacaccaacatgttgggaaacttggctcgaatctctgtgccttcgtctttcccatggggagggattctggttccagggtccctctgtgtatttgcttttttgttttggctgaaattctcctggaggtcggtaggttcagccaaggttttataaggctgatgtcaatttctgtgttgccaagctccaagccccatcttctaaatggcaaaggaaggtggatggccccagcacagcttgacctgaggctgtggtcacagcggaggtgtggagccgaggcctaccccgcagacaccttggacatcctcctcccacccggctgcagaggccagaggcccccagcccagggctcctgcacttacttgcttatttgacaacgtttcagcgactccgttggccactccgagaggtgggccagtctgtggatcagagatgcaccaccaagccaagggaacctgtgtccggtattcgatactgcgactttctgcctggagtgtatgactgcacatgactcgggggtggggaaaggggtcggctgaccatgctcatctgctggtccgtgggacggtgcccaagccagaggctgggttcatttgtgtaacgacaataaacggtacttgtcatttcgggcaaaaaaaaaaaaaaaaaa

SEQ ID NO: 40 - DNA, 3217 bp, Homo sapiens
ggccgggagacctggcggagctgggggtggggggccagtttttgcaacggctaaggaagggcctgtgggtttattataaggcggagctcggcgggagaggtgcgggccgaatccgagccgagcggagaggaatccggcagtagagagcggactccagccggcggaccctgcagccctcgcctgggacagcggcgcgctgggcaggcgcccaagagagcatcgagcagcggaacccgcgaagccggcccgcagccgcgacccgcgcagcctgccgctctcccgccgccggtccgggcagcatgaggcgcgcggcgctctggctctggctgtgcgcgctggcgctgagcctgcagccggccctgccgcaaattgtggctactaatttgccccctgaagatcaagatggctctggggatgactctgacaacttctccggctcaggtgcaggtgctttgcaagatatcaccttgtcacagcagaccccctccacttggaaggacacgcagctcctgacggctattcccacgtctccagaacccaccggcctggaggctacagctgcctccacctccaccctgccggctggagaggggcccaaggagggagaggctgtagtcctgccagaagtggagcctggcctcaccgcccgggagcaggaggccaccccccgacccagggagaccacacagctcccgaccactcatcaggcctcaacgaccacagccaccacggcccaggagcccgccacctcccacccccacagggacatgcagcctggccaccatgagacctcaacccctgcaggacccagccaagctgaccttcacactccccacacagaggatggaggtccttctgccaccgagagggctgctgaggatggagcctccagtcagctcccagcagcagagggctctggggagcaggacttcacctttgaaacctcgggggagaatacggctgtagtggccgtggagcctgaccgccggaaccagtccccagtggatcagggggccacgggggcctcacagggcctcctggacaggaaagaggtgctgggaggggtcattgccggaggcctcgtggggctcatctttgctgtgtgcctggtgggtttcatgctgtaccgcatgaagaagaaggacgaaggcagctactccttggaggagccgaaacaagccaacggcggggcctaccagaagcccaccaaacaggaggaattctatgcctgacgcgggagccatgcgccccctccgccctgccactcactaggcccccacttgcctcttccttgaagaactgcaggccctggcctcccctgccaccaggccacctccccagcattccagcccctctggtcgctcctgcccacggagtcgtggggtgtgctgggagctccactctgcttctctgacttctgcctggagacttagggcaccaggggtttctcgcataggacctttccaccacagccagcacctggcatcgcaccattctgactcggtttctccaaactgaagcagcctctccccaggtccagctctggaggggagggggatccgactgctttggacctaaatggcctcatgtggctggaagatcctgcgggtggggcttggggctcacacacctgtagcacttactggtaggaccaagcatcttgggggggtggccgctgagtggcaggggacaggagtccactttgtttcgtggggaggtctaatctagatatcgacttgtttttgcacatgtttcctctagttctttgttcatagcccagtagaccttgttacttctgaggtaagttaagtaagttgattcggtatccccccatcttgcttccctaatctatggtcgggagacagcatcagggttaagaagactttttttttttttttttaaactaggagaaccaaatctggaagccaaaatgtaggcttagtttgtgtgttgtctcttgagtttgtcgctcatgtgtgcaacagggtatggactatctgtctggtggccccgtttctggtggtctgttggcaggctggccagtccaggctgccgtggggccgccgcctctttcaagcagtcgtgcctgtgtccatgcgctcagggccatgctgaggcctgggccgctgccacgttggagaagcccgtgtgagaagtgaatgctgggactcagccttcagacagagaggactgtagggagggcggcaggggcctggagatcctcctgcagaccacgcccgtcctgcctgtggcgccgtctccaggggctgcttcctcctggaaattgacgaggggtgtcttgggcagagctggctctgagcgcctccatccaaggccaggttctccgttagctcctgtggccccaccctgggccctgggctggaatcaggaatattttccaaagagtgatagtcttttgcttttggcaaaactctacttaatccaatgggtttttccctgtacagtagattttccaaatgtaataaactttaatataaagtagtcctgtgaatgccactgccttcgcttcttgcctctgtgctgtgtgtgacgtgaccggacttttctgcaaacaccaacatgttgggaaacttggctcgaatctctgtgccttcgtctttcccatggggagggattctggttccagggtccctctgtgtatttgcttttttgttttggctgaaattctcctggaggtcggtaggttcagccaaggttttataaggctgatgtcaatttctgtgttgccaagctccaagccccatcttctaaatggcaaaggaaggtggatggccccagcacagcttgacctgaggctgtggtcacagcggaggtgtggagccgaggcctaccccgcagacaccttggacatcctcctcccacccggctgcagaggccagaggcccccagcccagggctcctgcacttacttgcttatttgacaacgtttcagcgactccgttggccactccgagaggtgggccagtctgtggatcagagatgcaccaccaagccaagggaacctgtgtccggtattcgatactgcgactttctgcctggagtgtatgactgcacatgactcgggggtggggaaaggggtcggctgaccatgctcatctgctggtccgtgggacggtgcccaagccagaggctgggttcatttgtgtaacgacaataaacggtacttgtcatttcgggcaaaaaaaaaaaaaaaaaa

SEQ ID NO: 41 - DNA, 890 bp, Homo sapiens
atcttcacccaggctggcccctttggtgaaactacaactcccaggggtctgtgcgcgagaaggcaggcgggtttttctaccggaagtccgctctagctctgggccctacaactgcaccctgagccggagctgcccagtcgccgcgggaccggggccgctggggtctggacgggggtcgccatgatccgctttatcctcatccagaaccgggcaggcaagacgcgcctggccaagtggtacatgcagtttgatgatgatgagaaacagaagctgatcgaggaggtgcatgccgtggtcaccgtccgagacgccaaacacaccaactttgtggagttccggaactttaagatcatttaccgccgctatgctggcctctacttctgcatctgtgtggatgtcaatgacaacaacctggcttacctggaggccattcacaacttcgtggaggtcttaaacgaatatttccacaatgtctgtgaactggacctggtgttcaacttctacaaggtttacacggtcgtggacgagatgttcctggctggcgaaatccgagagaccagccagacgaaggtgctgaaacagctgctgatgctacagtccctggagtgagggcaggcgagccccaccccggccccggcccctcctggactcgcctgctcgcttccccttcccaggcccgtggccaacccagcagtccttccctcagctgcctaggaggaagggacccagctgggtctgggccacaagggaggagactgcaccccactgcctctgggccctggctgtgggcagaggccaccgtgtgtgtcccgagtaaccgtgccgttgtcgtgtgatgccataagcgtctgtgcgtggagtccccaataaacctgtggtcctgcctggcc

SEQ ID NO: 42 - DNA, 776 bp, Homo sapiens
atcttcacccaggctggcccctttggtgaaactacaactcccaggggtctgtgcgcgagaaggcaggcgggtttttctaccggaagtccgctctagctctgggccctacaactgcaccctgagccggagctgcccagtcgccgcgggaccggggccgctggggtctggacgggggtcgccatgatccgctttatcctcatccagaaccgggcaggcaagacgcgcctggccaagtggtacatgcagtttgatgatgatgagaaacagaagctgatcgaggaggtgcatgccgtggtcaccgtccgagacgccaaacacaccaactttgtggaggtcttaaacgaatatttccacaatgtctgtgaactggacctggtgttcaacttctacaaggtttacacggtcgtggacgagatgttcctggctggcgaaatccgagagaccagccagacgaaggtgctgaaacagctgctgatgctacagtccctggagtgagggcaggcgagccccaccccggccccggcccctcctggactcgcctgctcgcttccccttcccaggcccgtggccaacccagcagtccttccctcagctgcctaggaggaagggacccagctgggtctgggccacaagggaggagactgcaccccactgcctctgggccctggctgtgggcagaggccaccgtgtgtgtcccgagtaaccgtgccgttgtcgtgtgatgccataagcgtctgtgcgtggagtccccaataaacctgtggtcctgcctggcc

SEQ ID NO: 43 - DNA, 1902 bp, Homo sapiens
gtgttaagtgctacggcagcaaattgctacatgtgctggatatctcttgttttcccctccagctccactctgctcttgcccacaaagctgacccgaatggaccacagcagtgggctcctatgcctcctggcttctgagtgggtttggccaaggagtgtcctggccagagatcagaggatggtagggtgcctattctcggctcttctcctggggttggggggctgccttagcagccaaaggtcacttctcccaaactccttccctgctttccaggttgccagtccctgcactcttcctttctggccaaggatgatgtcagttctgctgctactagcctggagttgcagaagctactgtgcttcctctttgggtagcctatacctatacttatctcctcataatatcttcatgtaaagaaccatctgtttcttattggaatcaagaccaataccaaggagaaattcctagggaacaaaaattccaatgaggaattgacctctttgtcagatccttatcaccaaacattagaaaagatctcataactttatacagcatgttgtaagcattttgataactaaaatcctgttctagtgaatgtcatgcagataactacacaaggagattaatttaaatttgccttctttggcaagcccttaaaccaatggctaaagcagttagttgtgagtttctgagtaggtcccaatgcgtttatttcatttgtccaacctagcacagagatcctttgatactttaattgcatggcttttccaatcagacgaaatttcagtctgagagaggacatattttctgaggtttatagttttaggattgtccaaaaggcctatgatctcttcttagcatgacagaaagagggaaagataagttaaatttcaagggggtcatatcatcacactttggtcttatttcattttcaatgatttcctagatcactttaacttttttgtgtcatggactcctcagaataatgggttttttttgtttgtttgtttgtttgagatggagtctcactctgtcacccaggctggagtgcagtggcgaaatctcagctcactgcaacctccgcctcctgaggttcaagtgatcctcctgcctcagcctcccaagtagctgggattacaggcacatgccaccacacccagctaatttttgtattttttagtagagacagggtttcaccgtgttggcgagactgatcttgaactcctgacatcaggtgatccacctgcctcggcctcccaaagtgctgggattacaggcatgagccaccatgcctggccagaataatgtttttaaatgcagaaaaggaaatgcatggggttacaagggaaacgaattacactgaagtgtaagctaccaaataatttatgatgtggtagttataggtgtgcatttaatagccagatctacgagtggatgtaataactgctatgatgttgaagtagcataaaacatatattagatatctgcaacaactgtgatgtaacatgaaaatacctgatttctgttgacaaagttactgctagtacaactgtggattgttgtctgcactcgtcattgaaggaaatactaaattttagttttaggctagtgaaattaaagttaatttttcccatccaagttcatgtatcttctgaattctatccgtgaatcccttagaggtctgtgaattgtaggttaagaacccctgccctagctaatcagatccaccaatgtttcaaataggactataacttattcaaaggccaatgatacttcgcataattcaattttaatattattcacatttcatgtcacaaatttagtaagttacatgtgttatgtgatgttttgttttgatagattatatcttactcctaaataaaaagtcaagatttttgtagc

SEQ ID NO: 44 - DNA, 1899 bp, Homo sapiens
gtagcctcatggaagagaagcagatcctgtgcgtggggctagtggtgctggacgtcatcagcctggtggacaagtaccctaaggaggactcggagataaggtgtttgtcccagagatggcagcgcggaggcaacgcgtccaactcctgcaccgttctctccctgctcggagccccctgtgccttcatgggctcaatggctcctggccatgttgctgattttgtcctggatgacctccgccgctattctgtggacctacgctacacagtctttcagaccacaggctccgtccccatcgccacggtcatcatcaacgaggccagtggtagccgcaccatcctatactatgacaggagcctgccagatgtgtctgctacagactttgagaaggttgatctgacccagttcaagtggatccacattgagggccggaacgcatcggagcaggtgaagatgctgcagcggatagacgcacacaacaccaggcagcctccagagcagaagatccgggtgtccgtggaggtggagaagccacgagaggagctcttccagctgtttggctacggagacgtggtgtttgtcagcaaagatgtggccaagcacttggggttccagtcagcagaggaagccttgaggggcttgtatggtcgtgtgaggaaaggggctgtgcttgtctgtgcctgggctgaggagggcgccgacgccctgggccctgatggcaaattgctccactcggatgctttcccgccaccccgcgtggtggatacactgggagctggagacaccttcaatgcctccgtcatcttcagcctctcccaggggaggagcgtgcaggaagcactgagattcgggtgccaggtggccggcaagaagtgtggcctgcagggctttgatggcatcgtgtgagagcaggtgccggctcctcacacaccatggagactaccattgcggctgcatcgccttctcccctccatccagcctggcgtccaggttgccctgttcaggggacagatgcaagctgtggggaggactctgcctgtgtcctgtgttccccacagggagaggctctggggggatggctgggggatgcagagcctcagagcaaataaatcttcctcagagccagcttctcctctcaatgtctgaactgctctggctgggcattcctgaggctctgactcttcgatcctccctctttgtgtccattccccaaattaacctctccgcccaggcccagaggaggggctgcctgggctagagcagcgagaagtgccctgggcttgccaccagctctgccctggctggggaggacactcggtgccccacacccagtgaacctgccaaagaaaccgtgagagctcttcggggccctgcgttgtgcagactctattcccacagctcagaagctgggagtccacaccgctgagctgaactgacaggccagtggggggcaggggtgcgcctcctctgccctgcccaccagcctgtgatttgatggggtcttcattgtccagaaatacctcctcccgctgactgccccagagcctgaaagtctcacccttggagcccaccttggaattaagggcgtgcctcagccacaaatgtgacccaggatacagagtgttgctgtcctcagggaggtccgatctggaacacatattggaattggggccaactccaatatagggtgggtaaggccttataatgtaaagagcatataatgtaaagggctttagagtgagacagacctggattcaaatctgccatttaattagctgcatatcaccttagggtacagcacttaacgcaatctgcctcaatttcttcatctgtcaaatggaaccaattctgcttggctacagaattattgtgaggataaaaatcatatataaaaaaaaaa

SEQ ID NO: 45 - DNA, 1899 bp, Homo sapiens
gtagcctcatggaagagaagcagatcctgtgcgtggggctagtggtgctggacgtcatcagcctggtggacaagtaccctaaggaggactcggagataaggtgtttgtcccagagatggcagcgcggaggcaacgcgtccaactcctgcaccgttctctccctgctcggagccccctgtgccttcatgggctcaatggctcctggccatgttgctgacttcctggtggccgacttcaggcggcggggcgtggacgtgtctcaggtggcctggcagagcaagggggacacccccagctcctgctgcatcatcaacaactccaatggcaaccgtaccattgtgctccatgacacgagcctgccagatgtgtctgctacagactttgagaaggttgatctgacccagttcaagtggatccacattgagggccggaacgcatcggagcaggtgaagatgctgcagcggatagacgcacacaacaccaggcagcctccagagcagaagatccgggtgtccgtggaggtggagaagccacgagaggagctcttccagctgtttggctacggagacgtggtgtttgtcagcaaagatgtggccaagcacttggggttccagtcagcagaggaagccttgaggggcttgtatggtcgtgtgaggaaaggggctgtgcttgtctgtgcctgggctgaggagggcgccgacgccctgggccctgatggcaaattgctccactcggatgctttcccgccaccccgcgtggtggatacactgggagctggagacaccttcaatgcctccgtcatcttcagcctctcccaggggaggagcgtgcaggaagcactgagattcgggtgccaggtggccggcaagaagtgtggcctgcagggctttgatggcatcgtgtgagagcaggtgccggctcctcacacaccatggagactaccattgcggctgcatcgccttctcccctccatccagcctggcgtccaggttgccctgttcaggggacagatgcaagctgtggggaggactctgcctgtgtcctgtgttccccacagggagaggctctggggggatggctgggggatgcagagcctcagagcaaataaatcttcctcagagccagcttctcctctcaatgtctgaactgctctggctgggcattcctgaggctctgactcttcgatcctccctctttgtgtccattccccaaattaacctctccgcccaggcccagaggaggggctgcctgggctagagcagcgagaagtgccctgggcttgccaccagctctgccctggctggggaggacactcggtgccccacacccagtgaacctgccaaagaaaccgtgagagctcttcggggccctgcgttgtgcagactctattcccacagctcagaagctgggagtccacaccgctgagctgaactgacaggccagtggggggcaggggtgcgcctcctctgccctgcccaccagcctgtgatttgatggggtcttcattgtccagaaatacctcctcccgctgactgccccagagcctgaaagtctcacccttggagcccaccttggaattaagggcgtgcctcagccacaaatgtgacccaggatacagagtgttgctgtcctcagggaggtccgatctggaacacatattggaattggggccaactccaatatagggtgggtaaggccttataatgtaaagagcatataatgtaaagggctttagagtgagacagacctggattcaaatctgccatttaattagctgcatatcaccttagggtacagcacttaacgcaatctgcctcaatttcttcatctgtcaaatggaaccaattctgcttggctacagaattattgtgaggataaaaatcatatataaaaaaaaaa

SEQ ID NO: 46 - DNA, 735 bp, Homo sapiens
agtggttctccgcccctgccactgggccatggagactgtggcacagtagactgtagtgtgaggctcgcgggggcagtggccatggaggccgtgctgaacgagctggtgtctgtggaggacctgctgaagtttgaaaagaaatttcagtctgagaaggcagcaggctcggtgtccaagagcacgcagtttgagtacgcctggtgcctggtgcggacaaggtacaatgatgacatccgtaaaggcatcgtgctgctcgaggagctgctgcccaaagggagcaaggaggaacagcgggattacgtcttctacctggccgtggggaactaccggctcaaggaatacgagaaggccttaaagtacgtccgcgggttgctgcagacagagccccagaacaaccaggccaaggaactggagcggctcattgacaaggccatgaagaaagatggactcgtgggcatggccatcgtgggaggcatggccctgggtgtggcgggactggccggactcatcggacttgctgtgtccaagtccaaatcctgaaggagacgcgggagcccacggagaacgctccaggagggcctgtccatcctcgctgtcctttccctgttctccccctgccccccgtctctatcctctgtggccttcagctaatttctgctcccctgagattcgtccttcagccccatcatgtgctttgggatgagtgtaaataaaacggggctgtggcttgggaaa

SEQ ID NO: 47 - DNA, 1283 bp, Homo sapiens
ctctctgctcctcctgttcgacagtcagccgcatcttcttttgcgtcgccagccgagccacatcgctcagacaccatggggaaggtgaaggtcggagtcaacggatttggtcgtattgggcgcctggtcaccagggctgcttttaactctggtaaagtggatattgttgccatcaatgaccccttcattgacctcaactacatggtttacatgttccaatatgattccacccatggcaaattccatggcaccgtcaaggctgagaacgggaagcttgtcatcaatggaaatcccatcaccatcttccaggagcgagatccctccaaaatcaagtggggcgatgctggcgctgagtacgtcgtggagtccactggcgtcttcaccaccatggagaaggctggggctcatttgcaggggggagccaaaagggtcatcatctctgccccctctgctgatgcccccatgttcgtcatgggtgtgaaccatgagaagtatgacaacagcctcaagatcatcagcaatgcctcctgcaccaccaactgcttagcacccctggccaaggtcatccatgacaactttggtatcgtggaaggactcatgaccacagtccatgccatcactgccacccagaagactgtggatggcccctccgggaaactgtggcgtgatggccgcggggctctccagaacatcatccctgcctctactggcgctgccaaggctgtgggcaaggtcatccctgagctgaacgggaagctcactggcatggccttccgtgtccccactgccaacgtgtcagtggtggacctgacctgccgtctagaaaaacctgccaaatatgatgacatcaagaaggtggtgaagcaggcgtcggagggccccctcaagggcatcctgggctacactgagcaccaggtggtctcctctgacttcaacagcgacacccactcctccacctttgacgctggggctggcattgccctcaacgaccactttgtcaagctcatttcctggtatgacaacgaatttggctacagcaacagggtggtggacctcatggcccacatggcctccaaggagtaagacccctggaccaccagccccagcaagagcacaagaggaagagagagaccctcactgctggggagtccctgccacactcagtcccccaccacactgaatctcccctcctcacagttgccatgtagaccccttgaagaggggaggggcctagggagccgcaccttgtcatgtaccatcaataaagtaccctgtgctcaacc

SEQ ID NO: 48 - DNA, 1812 bp, Homo sapiens
tagctaggcaggaagtcggcgcgggcggcgcggacagtatctgtgggtacccggagcacggagatctcgccggctttacgttcacctcggtgtctgcagcaccctccgcttcctctcctaggcgacgagacccagtggctagaagttcaccatgtctattctcaagatccatgccagggagatctttgactctcgcgggaatcccactgttgaggttgatctcttcacctcaaaaggtctcttcagagctgctgtgcccagtggtgcttcaactggtatctatgaggccctagagctccgggacaatgataagactcgctatatggggaagggtgtctcaaaggctgttgagcacatcaataaaactattgcgcctgccctggttagcaagaaactgaacgtcacagaacaagagaagattgacaaactgatgatcgagatggatggaacagaaaataaatctaagtttggtgcgaacgccattctgggggtgtcccttgccgtctgcaaagctggtgccgttgagaagggggtccccctgtaccgccacatcgctgacttggctggcaactctgaagtcatcctgccagtcccggcgttcaatgtcatcaatggcggttctcatgctggcaacaagctggccatgcaggagttcatgatcctcccagtcggtgcagcaaacttcagggaagccatgcgcattggagcagaggtttaccacaacctgaagaatgtcatcaaggagaaatatgggaaagatgccaccaatgtgggggatgaaggcgggtttgctcccaacatcctggagaataaagaaggcctggagctgctgaagactgctattgggaaagctggctacactgataaggtggtcatcggcatggacgtagcggcctccgagttcttcaggtctgggaagtatgacctggacttcaagtctcccgatgaccccagcaggtacatctcgcctgaccagctggctgacctgtacaagtccttcatcaaggactacccagtggtgtctatcgaagatccctttgaccaggatgactggggagcttggcagaagttcacagccagtgcaggaatccaggtagtgggggatgatctcacagtgaccaacccaaagaggatcgccaaggccgtgaacgagaagtcctgcaactgcctcctgctcaaagtcaaccagattggctccgtgaccgagtctcttcaggcgtgcaagctggcccaggccaatggttggggcgtcatggtgtctcatcgttcgggggagactgaagataccttcatcgctgacctggttgtggggctgtgcactgggcagatcaagactggtgccccttgccgatctgagcgcttggccaagtacaaccagctcctcagaattgaagaggagctgggcagcaaggctaagtttgccggcaggaacttcagaaaccccttggccaagtaagctgtgggcaggcaagcccttcggtcacctgttggctacacagacccctcccctcgtgtcagctcaggcagctcgaggcccccgaccaacacttgcaggggtccctgctagttagcgccccaccgccgtggagttcgtaccgcttccttagaacttctacagaagccaagctccctggagccctgttggcagctctagctttgcagtcgtgtaattggcccaagtcattgtttttctcgcctcactttccaccaagtgtctagagtcatgtgagcctcgtgtcatctccggggtggccacaggctagatccccggtggttttgtgctcaaaataaaaagcctcagtgacccatgag

SEQ ID NO: 49 - DNA, 1049 bp, Homo sapiens
gctccaggagcttccggtatgtgttttccctctgttctcgattaccttggcaacggctgaggcgggagaccggtggtctgcaccgtcctggagggagatatgagtggctggactctcagccagccactgggatgtgttcgggctttggaccctgaggccggagagagctcccgagaggaggcggcgccacgttcgttcttctgaggggacggtagatttgggggttttcctctaggattctcgcgccgtttcctctgaagaaacaggaccagagagggaaggtgacctgaaagtcacagaataattttttagagctgaacaagaatccaagcctgcaactgcagagacgagagatctttctgctgtctatactcttggaaagcacatcctaagatctttgcagattatcctgtggaaggaaaatgcctaaagtcaaaagaagccggaaagcacccccagatggctgggagttgattgagccaacactggatgaattagatcaaaagatgagagaagctgaaacagaaccgcatgagggaaagaggaaagtggaatctctgtggcccatcttcaggatccaccaccagaaaacccgctacatcttcgacctcttttacaagcggaaagccatcagcagagaactctatgaatattgtattaaagaaggctatgcagacaaaaacctgattgcaaaatggaaaaagcaaggatatgagaacttgtgctgcctgcggtgcattcagacacgggacaccaacttcgggacgaactgcatctgccgcgtgcccaaaagcaagctggaagtgggccgcatcatcgagtgcacacactgtggctgtcgtggctgctctggctgaggctggcgcgctccaccctggactctggacttcgcaggttcctgcctgtcacgccacccccttcctgggagcagcgagcagtgccccaggcccgagttggagcacggtctctatggggaaggcttcgctgtctatcagctgtgatttgtaaaaataaaatctttaaatctctcgaaaaaaaaaaaaaaaaaa

SEQ ID NO: 50 - DNA, 4166 bp, Homo sapiens
cggcgcgggtgttgagagcggtgtggtaggtgttgtagccgctatggtgaagttcgctttgtagcggccccggctagagagttggcctgttccctgcctttgtgacccggaggagcttttgggggtgcgtcaagcccctggcctgaggcagcgaactggtttgtggcctgtttgattcctgtcagaggtttgctgacccaagacagtatcgaaaatgcatattaagtcaattattctagagggattcaagtcctatgctcagaggaccgaagtcaatggttttgaccccctcttcaatgctatcactggcttaaatggtagtgggaaatccaacatattggactccatctgctttttactgggcatctccaacctgtctcaggttcgggcttctaatttacaagatttagtttacaaaaatgggcaggctggtattaccaaagcctctgtgtcaatcacttttgataattctgacaaaaagcaaagtcctttaggatttgaggttcatgatgaaatcacagtaacaaggcaggtggttattggtggtagaaataaatatttaatcaatggagtcaatgccaacaacaccagagtacaggatctcttctgttctgttggccttaatgttaacaaccctcactttctcatcatgcagggccgaattacaaaagtattgaatatgaaaccaccagagattttatccatgatagaagaagcagctggaaccaggatgtatgaatacaaaaaaatagctgcacagaaaactatagaaaaaaaggaggctaagctgaaagaaattaagacgatacttgaagaagagattactccaaccattcaaaaattaaaagaggaaagatcgtcctacttggagtaccaaaaagtaatgagagaaatagaacatttgagtcgtttatatattgcttatcagtttttgctggctgaagataccaaagtacgctcagctgaggaattaaaagaaatgcaagataaagttataaagcttcaggaagaattgtctgagaatgataaaaaaataaaagcacttaatcatgaaatagaagaattggaaaaaagaaaagataaggaaactggagttatacttcgatctttagaagatgctcttgcagaggctcagcgagttaatactaaatctcaaagcgcatttgatctcaagaagaaaaatctggcatgtgaggaaagcaaacgcaaagagctggaaaaaaatatggttgaggactcaaaaactttagcagcaaaggaaaaagaggttaaaaagataacagatggactgcatgcccttcaagaagcaagtaataaagatgctgaagctctggcagctgcacagcagcacttcaatgctgtttccgctggcctgtccagtaatgaagatggagcagaagcaactcttgctggtcaaatgatggcctgtaaaaatgatataagtaaagctcagacagaagccaaacaggctcagatgaagttgaagcatgctcaacaggaattaaagaataaacaagctgaagttaagaagatggatagtggctacaggaaggatcaagaagctctagaagctgtaaaaagacttaaagaaaaacttgaagctgaaatgaaaaagctaaattatgaagaaaataaagaggaaagccttttggaaaagcgcaggcagctgtctcgtgatattggtagattgaaagaaacatatgaagctctattagccagatttcccaatcttcgatttgcatacaaggatccagagaagaactggaatagaaattgtgtgaaaggacttgtggcttctctgattagtgtgaaagacacttctgcaaccacagctttagaattagtggctggagaacgactctacaatgttgtagtagacacagaagttactggtaaaaagctactagaaaggggggaactgaaacgtcgatacactataattccactcaataaaatttcagccagatgtattgcaccagaaactctgagagttgctcagaatcttgttggccctgacaacgttcatgtggctctttccttggttgaatataaaccagaacttcagaaagcaatggagtttgtctttggaacaacatttgtttgtgacaatatggataatgccaaaaaagtggcctttgataagaggataatgactagaactgtaactctcggaggtgatgtgtttgatcctcatgggacattgagtggaggtgctcgatcccaggcagcttccattttaaccaagtttcaagaactcaaagatgttcaggatgaactgagaatcaaagagaatgagctgcgggctctagaagaggaattagcaggtcttaaaaacactgctgaaaagtatcgccaactaaaacagcagtgggagatgaaaactgaagaggcagatttattacaaaccaagctccagcaaagctcatatcacaagcaacaagaagaattagatgcccttaaaaaaaccattgaggaaagtgaggagactttgaaaaacactaaagaaatccaaagaaaagcagaagaaaaatatgaagtattggaaaataaaatgaaaaatgcagaagctgaaagagagcgagaactgaaagatgctcagaaaaaactggattgtgccaaaacaaaggcagatgcatctagcaagaagatgaaagaaaaacaacaggaagttgaagctatcactctggaactggaagagctcaagagagagcatacatcttacaaacaacagcttgaagctgtaaatgaagctatcaaatcctatgaaagtcagattgaagtaatggcagctgaggtggctaaaaataaggagtcagtaaataaagctcaagaagaggtgaccaagcaaaaagaggtgataacagcccaagacactgtaattaagctaaatatgcagaagtggcaaaacacaaggagcaaaacaatgattctcagccttaaaattaaggaattagaccaccacatcagcaaacataaacgggaggctgaagatggtgctgcaaaggtatccaaaatgttgaaagattatgactggattaatgcagagagacacctctttggccaacccaatagtgcctatgatttcaaaactaacaaccctaaagaagctggtcagagacttcagaagttgcaagaaatgaaggagaaactaggaagaaatgtcaatatgagagctatgaatgtattgacagaagctgaagagcgatgcaatgacttgatgaagaagaagagaattgtagaaaatgacaaatccaaaattcttacaactatagaagaccttgaccagaagaaaaaccaagccctaaatattgcatggcaaaaggtgaacaaggactttgggtctattttttctactcttttgcctggtgctaatgctatgcttgcaccaccagagggtcaaactgttttggatggtctggagttcaaggttgccttaggaaatacctggaaagaaaacctaactgaacttagtggtggtcagaggtctttagtggccttgtcattaatactgtccatgcttctcttcaaacctgctccaatttatatccttgatgaggtagatgcagccttggatctttctcatacccaaaacattggacagatgctgcgtactcatttcacacattctcagttcattgtggtgtcactaaaagaaggtatgttcaacaatgcaaacgttcttttcaaaaccaagtttgtggatggtgtttctacagtagccagatttactcaatgtcaaaatggaaagatttcaaaggaagcaaaatccaaggcaaaaccacccaaaggagcacatgtggaagtttaaactacaaagttatttcttcatcttgacctgtttttttaaatgtaaacttttaaggacttgagataactaatttgtttatatacaaaaattaatgttactgtgttacttaacccatgttttctctttatataatcacttatcgcttacaaatgagcatatattcctcatctcttaactagtctaattatggtccaattattgtggttgtgattttatgcatatccatcaaaatgttttttttcttatgcgggtcttttatatattagggatcctgagatacccgattctatatgtaaaagctaatatacaaaaaagcagattaaattacatgataaatgtagctgaaaaaaaaaaaaaa

SEQ ID NO: 51 - DNA, 190837 bp, Homo sapiens
gatcttacactaaatgctcttaataatataaatgacacaggagaaaattttgggagatagtggatatacctaaggccttgatggtggtgatggcttcactggtgtatacttattcccggactaatgtagttgtagccttaaataggtataggtttctttcttttttctctttctttctttctttctttctttctttctttctttctttctttctttctttctttcttctcttttttttttctttcagatggagttgctgtgtcaccaggctggagtgcagtggtgcgatctcggctcactgcaacctccgcctcccaggtccaagtgattttcctgccttagcctcccgagtagctgggattacaagcatgtgccaccacacccagttaatttttgtatttttagtagagatgggatttcaccatgttggccaggatggtctccatctcctgaccttgggatccacccacctcggcctcccaaagtgctgggattgtaggcgtgagccaccgtgccaggccaggtgcaggtttttaggtgtcagtcatgtctcaatgaagtgattttaaaaataaataaaacttaacaatttttaaagaaataaaaaaacacatatataaataaatacattaaatatgccaaaaaaaaaaaagaagtgaatgggcctgctgtggctccccgacgtggctgtggtccccaagggtccgtggcgctgtaaatgctgagattcataggtctgtgccatgttcctccagctccggatgcaacttgggaattggtgtgttctggagtcacaagaccaggaacacatcccggcctttgcacttctgggctgtgtggccttgagcaagtcacctcacctctctggaccacagtctccttgtgtctgacaatggtctctagactccccttgttatgggatggatgctaccaagcagcagcttgtttttccttcaccctattttgtggatgggaaagctgaggcccagagaggccaggaggcttagctggggtccccagggaaggagtgacagagttaggacagaattgaggcctcccaggcacaaccatcttatttccacaagactccccagccctggacatcttggaagaaagacgcatgcaccttgcctgacgcccagactgccattggtcaaacattccctgactcttcccagcctcagctcctcgactgagccctgagtctgacaacccacaattcctgctcatattaggtgagatgggccacctgtccaaaaaagatttatctggggcttggaacaagtgagagaatgaggcagacccagagagctgctcagagacgccacaagtctattttcctccaatggggccattgaggggttggaccacctgcgaggccttgtttcagtttgtctgtttttaatccttctcctgaaaacaagcggtttcaagtgagaagtgtgattttctgtgcactccatcaaaggtgcttattgagcactgagatgtcacagagtttttggttcatccaatgggcatcttctgaaagtctacaataaatttatccattcattcactcgttcatttagtcatccaacaagcatttataacgacctctgggcaaaaggccaggcaccatgctaagctgtgaggattcagagataaaaacttgggctcccatctttaaggttcactgtctatacgacaaacatgctgctacgggtcaattggtactgtgctagttgaccagatatgtgtacaatgaactatgtcaatgaaggagtgaagggaaagcttcccagctgaagggctgtttgacttgggctctgagggttgagtaggagttcattaggcagagatgagtgttgtaggtagtgggattagcatgaatgatgtagaagagaaattacgtatatagaggtgaagtgttatttgactaacacgtggaatatctgaaagtataaatctgtgtgtgtgtgtgggtgggaggtaggggtcatagtgggatggaaagctaacaaggtggaatgagacaaattaacaagatccttgaatgccacaccctggacagtaaattttactcagctggcacaggagaatgcagcagagatttttatctaaggaaaaatgggatccatgcatttttaaaagggctggatgcagcaggaattttgcccccttcagggtcttatagggaattgagtggataagatagattgtacttctttccccagaaagtacagctagctgggactcttgagcgctgaggctcagtttaagtcctgccacttccaggtagccttctgtgatcactccttctccggatgtttggctggtgagagcactggggcgtcatctgcacatggatttgaactctagacccatgttaaacaagctctgctctcttaagaaggcatctcatccctaggactctcacgttcctcttctcagaaaggaacctgataatgactagaatattatcctggcaggaccgttctgaaaatcaaatgagatcatggatggggaggtgcctggtgctgggtctcactccctggcaagtggggccaggaagtgagtctgcagagtctttccctgatcactcaaattggatgctctgaaagtttctgtcctattccccctccctctcagagatactcgctctgacactaacagttttatttctggaatggaggatcagggacaaagcggaccctcttagttccaggagtgcccataaattatgggaagatgagaatattttaatacaaaccaaagaatctcacgtacaaagagctgctctgagaacgtgttttcttcccccttactcccccttccaattcccctgatatttggagctaagaagactccttggggaatttataacaagtagaatatttaagggtaaggagccagaggtctctttggcgttcacttttcagggaagtcacctcagagtggtatgtacatgagtgacataaaaggaaggttgtgcatagagaaggggagaatatgccaagaattgtcaattatgcaaaaaaaaaaattgcttgtccaaaagagtgatgtgtctggctttattccccagatagaattcagcattctgggcaaggcctttgccagactgtgagattttctggaagcgcctgtggcgtggctcctctgcctcacctgtgatgacaggtcactgggtcagctgggggtcactttccacgtgctccatcagagacagccttaggatttgtgctttgacctatctcacagagatcctgctattctgattcctttggttgggtgacagtttccaggagggacctggattggcgacgtgctatgcccagtgctatgcatgggagaaagatctcttcaatgaaggcattagttatgtattggcacagttaatgctgcataacaaacagtaatgtaagctcaagagtatataacaatatatttttttctttggctcataggtcagctggttggttttactgatctgagccaggcttgcctaatcccagctgggcctgctcatgcaagctggtgggttggctagagctgactggtctaggatggcctcacttgcatgttctatggttgactagctgttggcaggggcgatggaggtgactagaccccaggtcttgtgtcccccagcaggctagcctgggctttgcatgggagcttggagggttctacaagagaaagtgaaagcttgttaagacctaggtgcagaactggcctgacgtcacttctgccacattctattgcccaaggcaaatcatatgggcagctcagattctagaggcgatgaaaagtctccatcctccaatgggcagagcttcaaagttacattgcaatgggcatggggatagggaagggcagatccttggggcttatttttttcaatctgtctactgaaatggataaacagaagtagttagtttcactgacaagtattactagcacctctgtgttgagtcttatgctaggtgctggcagaggtggtgaatatgagacagtcccattctgagggtaagacacagacatagaaatggatgattgtgatccactgtcagtgctgtaattggggaagctcaggcagcggtgggagaccagaggaggctcacacactccctggaggtcagggaaggcttcctggaggaggtcgctcctgatctgagtcttgacatttgagtgggagctcacagggtgagggaggtggcaagaggggtgacgggaggaggagaaatcagtccaagaagaggaagcagtgagtgcacaaaggcatgcacgtgagagggacctgttagagagagaggccagggcatagagcaagggacaaggcctggcctagcttaggtcacaatgtcccttggaattaggagactgttggcttgagatatccaccacacccagagcagggttttgaggggtgttctgataaaggggtgagggaaatgttgagcagagccttattaataacaacgaaacccctccagtcgcccacctcccccaaacacgaaacatcagctgccagccaagtctgctgcgagctggggtctcaaggcagatataatccctgctcccaaaaaccttaccaggtctcagagacatgcgtcagctcctcagctttccagggtctgcaggaaaagtgaggagcagctcttgatggccactaacccgtagccccaccacaacccaccctgcagatcccatcactctgcagatcccatcatcctgcttcctttccttccctgggattagatacacctgaaattgttgttctctctgttcactttgtccccagccgactcccccaggcacctcctgagatgttgggctccatcaaagtggccaccatgtctttttgtccttcatctcggtttctttagtacccgagtcagcacctgggcatgatgggtgccgaaactgtcttggcagagtaaaggacaggccagctccctgcaagatgctgagcaagccatgtgctctttctgagcctcagtttgcacatctgtaattcggggatgttgtacagcagccaattctgccactattttctgagatcctgcttgcagctggaccctggcttaatatactggagagaatttccaggagagattctgacccacggattttcttgcctgtggacaattgtcagaattctccaccttctagggtgcgaggatggattatggagaaatggacataaagcaggtggcaggaaacttacaaaggggaggcatttctgtctgacttcacatttcccatcagcggggcctttttttttttttttttttttttttttttgacagagtctcgctctgtcacccaggctggagtgcagtggtgcaatctcggctcactgtaacctccacctcctgagttcaagcgattctcctgcttcagcctcccaagaagctgggactacaggcgtgtgacaccatgcttggctaatttcaaaactttctgcatcctgaggggcatgcccaagtttacctgtgctcacagaggaaggaggtgtacaaacccacatgggagttattttccagtgtgattgacactccacacccatctaagtgcggctggcatggaagtggtggccccgcaggcaggacccatccttatctttgcctgggagctttttaaaaggttaccagacacccacttccacttcccccccttaagctctgtttctgagtctcttttatttgaatccagggaaactagctgaatgtaaagccatcaaaaccaaagtgacccgagatgtccgattggcccatattggccagaaaatgagtatttcccagcttccaggagggtctgtttgccccaacatcctgaaacctcaaccccctccttccccaggaaaaggaaggagcagctggctcaaattgctcccccaaattcctggcctggcagtggttaaaatgtgatcccttttattcgagtaatagagaggaagttcccgggccttcaagaagcatcaatccagagatttattaaccaatttaaaatactattgtctttcacttcagagcaagattgaggggtgttgttgcaggaatgtaaagtcagagtgactgagcctcagagccaggaggggtctgtacctgggactcaatagatattcatgaacattcccgtatttagtgaaggaaataacttaataccgacagtgcgatggaataatagctatttcctggctgacttgcaggcctcagaaaatgagattgcagtggcttcatttttcttgtcttttcctgtgctccctgccagagaaggagctgccactgggattctctctgcatttgcaatgagctggggcctgcagcccccacccaggcctggtgactcccttatcaccccttctatttgctgtgaccttggcctcggcttcatggagaggtcaccctgcaccctgtttagctgtacagatgaccaggaaagtagatcaacctttattcagatggaggggcaggcagactggtttatttgaggatgattttgacattcatccactcattcattcactcagtattcactgagggtctacctatcacactctgaatgctgaggacacaaacatgaatactgtccagtccttctctcttgcaacttggtccactgaaagagccacacactaaagcatttcagggacccctagaggtgtccacacaaggcttagaaagcctcagaaaaaaacgagatcgtgatacttagaaagacagaagatcaggaatgacatcagcagggacatgcctcttaaaagttgccaaggtctgattcatcaaaagaccacctgccaagcactttacccgctttgtttcatttggatctcatagaagcttcatgatgtgcactttgtcgttctccccattttataggtgatgagatgaggctcatccagatgcattggcttccccaaggttaaccggccagaaagcggcagggtcaggatttgagcccgtgtttgttggattctgattccgggctctggagggcctcagtgtcctgctggtctttgcccaggtggtaggtgtagggagggtatttcaggcagtgggcacagcctgggtaaaggcacagagatgtggaatggtcgacctgatgctttgggggactctaagtggtcacttatgggttgatggcaagatgggagtgggtgctggggcacagctgagtggaaaccagggtagagagaggtgtagaggggcgtcctgaggagtttggacctgaactggtagacaaaagggggaactaatgaatgattttagcttggagacaggggaggctctatgcacgatataatctggccctccagactgatctccatccttcaccatccagccctgagcccaggaaactgatatgcgtggaccaggtcaacagattctctctggctctggctgggttccgccaatgaggatccccagcaggagatcaaaggagagggagaggaagggcaggggttcatcctctggtttcctgggctggctgtggcctttgactgaaggtcatcaaagtgatctaaccccactctccctccttctaggttatggtagcctccctctcccctcattcaggcctaagccggggaagtagctcagctgcttccagccaaggttatctccattccacccacacctttggaatgagtccctttgtaaataaactctcctccattgaccttaacttgagagtgccacccatttccctccgacccacatagctcctttgggccatcttacgtgcaagtcagaaatctcaagatcaaggtgtccaaaggaccaaccacattccttctggcggctccaggaaaagaaccttgccttttccagcttctagaaacactccttggttcatgaccccttccttcagctttaaagccaacagggtagcatatcccagtcactcccctgctctctttgaccacatcttttctcttttacttgcacccctgtccatcctgcccccgactccctttataagaatcttcatgatcaaattggtctttcctggctaacccaggataatatcctgtctcaaaatccctaatgtaatcacatctgcaaagccccttttgccatgtaagataacatattcacaggttttggagatttggatgtggatgtattgggggcctttattgaacctactacagccggggaagtttggattcagaaatcaagccaggacaatatcacaagtatatctgcactctcactgaggcatgggaattagcatatatgggcatgagggcatgccccggttctggttccagatttcctgagtgaccttgtgcaagtcactaagcctctccatgctgcagaattctcatctatcaaatgagtgacttgtcctgcatatgctctgaatctgagctcaattgttcaagaaggtttcaatgagtatatatgttctcaaggggtcagtattcacaaccacatatttgggtaggaaaagataaaacccacctatccacacctcaagccacacctctggcttgggaagaaagagatgtgtctgttgtgttagggactgggggaccaccagagcaagttttttttgttttgttttgtttctttctgttggccatggggccagggtttgctctgttacccaggctggagggtagtggtgtgatcatagctcactgcagtctctaactccagggcaggctcaaagtatcctcctgcctcggtctcctaaattgctgggactacaggcctgcatcaccatgcttggctaatttttaaatttcttgtagagacagggtctcactatgttgcccaggctgctcgcaaactcttatcctcaagtaaccctcctacctcgacctcccaaagtgctgggattacaggtgcaagccaccagagcacctgccagaaacttacattttagaatgagtcctctgggtgctggcggaaagtttattctaagggggcaaaaatggaggcaggaagaccatggaggaggctgccgaggttgttcaggcaaaagataaggtgcctggccctagagtgggcccagccagggtggcaagaggtgggaaggtgtaagtgatgctgggaggtctccctaacaagacatggtgatggaccaggtatggagctggaagaaggagatgacaaggatgctttctggcctcagggggctgggtggagtttggcaccatctgctgagctggggcctgtgaagagaagcagttctgggtaaaaggaagatactgagtttataaagcacgctgaagtcaaggagctggagatcatcccatgggggctgtccagagagacacacggatctaggtagaacaatgcaggtgtcaacagctcataatggtagaaggaaaaacccagcagccaaagtgatgtttttgtttgttgttgttgtttgtttgtttttgtgagacagagtctcgctctgtcccaggccggagtgcaatggtgcgatctcagctcactgcaacctccgcctcctgggttcaagctattctcctgcctcagcctctcgagtagctgggattacaggtgcacaccaccatgcctggctaatttttgtatttttagtagagacagggtttcaccatgttggccaggctggtctcgaactcctgacctcgtgatccgcctgcctcggcctcccaaagtgctgggattacaggcatgagctgccgtgcctggcctaagtgatgtttcacaaagcaaatcagaccaggccacttgtgtgttcagtggctttccatcttactcagcatgaagtctgattgtttttaccaggactacactacaaggttctgcacactccacctgccatctcctcttcactcactctgctccaggttcagccgtctccttgctgtgatttaaactcaaccgcacatgtccagtcagatcttttgctctctgccctgtcttccttcgcttgcacagaagtgtttggtccccacagcttgtttcccttggtctgcagatgtagggattatgcatccacagatgcttccagcaagcgttttccagccctgaatgccccctacctccacctgttggagccagctgtgcttcctagtcaaggacagagggtctgtctcctcttgagtctctggggctcatccagtcagttcccaagctgggttcctcagcagctttcacgacagaaaggggtcatgccccaccctgggacttctaggagagatggagacagcattctgttgagggacagatgttacacagggagaccatactcttttgtatgggtttcatacaggttatgaagaaaaaccaagtaaggagtcagctagaaagggacaggcattctctgtagccagaagattaggcaagacgtttcggaggaggtaaggcttcatcagggacaagtgagtgggtaatgaagcatgtggccagaatattccaggcagaagaaaccagtgcaaaggccctgtggcagcagggtcacggggagtgtaagacctgggaagagtgcacagtggtaggagaggaaggtagacagaaagggaggctggcagatcccagaccatgcacgcctttgaggccacgatcaagaattgctttggattctgggaataaaacattaaagagtcttaagcagggagtgacacaatcgggtttggttttgacaagatccctcctggttggaaaagggactggggaagagaaagtatagatctcagtttagagacaacggccattcaagagtggcttggatgggacagatagagagatggaaggctggagagtgggcagtaagttgcagatatgggagagggaagaagacgcatgtccagcttgtttccagcccctcccacggaatcaagggaaattgttttaggatgaaatcccaaacagtcctgttttcccaaccagtatgtagtatctaggaaacttgggctattagagatgccctaggaaaaaatatatttctaaatgtaagaagatgcagagaaattcctggttgacagattgccagcaggtcctaagggaaattcctagcactcagatggggatgtgggctgcttttagggacagcaaaaatagcacactatggtggaaaatatctgtttttactcttagatgtctgcttggaacgtcacagcatctgtggggtaggggggagcattatcatccctgttttcaagataaggagaatcagagaagttggtgattttaccaggtccacacgactcactgtcactattggggtgaggatctgggtcccctggataattacatcatgctttctactgtgtctggttccaagggattctgggtcagggttgcctcgtctgtaaaatggggataattcccacacctgcctccagggggtgctgtgaattttaaatgcaacaggcacctggacaaggctttgcctctgtgcactctaggggcagttcctgggctattgtgggctccatcacaatggccaccctggtgttccttctctagtcctttgaatgagctgctccctcctcccctcccagggctgcttccttgttccttcaggtctctgtttagatggcactgccttagagagctttccctggctacaccatttaagacaaccctcttggttatcattcacctcagttctctgttcatcccatcattgcactcatcataacaaaggcaaatgtgtctattcaaggacttgttaatgatctgtcgcaggctccagtggggcagagttcacatccctgttgataattggggctaactgtatgcagtgcttgtcatacaagggggacccttctacatactttacctggatgaattctcctatctctgatgacaatcctatcattcccattttacagatggcacatagagcgacagcaagcatctttcccaagttcacacagtcggcaagtgctcacactgatatttgaacccagaccatgcctggctcagagtagaaactcaataaatatttgttgcaagaatgaagggttgggttttgttggaaaaaggcctgattgtggactgattggctgactgtcaagcctcgcagtgcatcgagcatcagcgctacgaagtaagctgcgtaagtgatccttctggctcccaggctgcaggcaggtcttgcctctagctttcaaacagaagggagcatgcatcatttgctgggccaaattaggactttcgtcttccttgtgtacttttgcattcatgggcccttctcaccattaaaaacaaattaaaaatacattttagaactgtgctggtataaagaggaatacgctgcaggttgtattaggtcggtgcagaagtaattgcagtttttgccattaaaagtaatggcatgagccactgcgcccagcctcactctctctctttttttttttttttttgagacagagtcttgctctgtcacccaggctggagtgcagtggtgcaatctcggctcactgcaacctccgccttccaggttcaagcgattctcctgcctcagcctcccgaatagctgggactacaggcgcccgccacctcgcccggctaattttttgtatttttagtagagacggggtttcaccgtgttaaccaggatggtctcgatctcctgacctcatgatccacccgcctcggcctcccaaagttctgagattacaggcttgagccaccacgtccggctgcctcacttcttttaaaattaaaagcaaaaattgactataacattagggacagaaaaatagcacactatggtggaaaatatctgtttttactcttagagatctgcttggaacgtcgcagcatctgtggggtagggaggaggattatcacccctgttttcaagataaggagaatcggagaagttggtgactttaccaagtccacacggctcactggcagtgagtgactcatgcctataattcagtactttgggaggccaaggcgagaagattgcttgaggccagcagtttgagaccagcctgggcaagatgagtgagacctcctctttacaaaaataaaataaaacaaaaataataataattaaaagaaacgaaagcatttttgtgggcccctaggtgtattgtggtccctagatactctgcctactgtgccaaatggagaagttggccttgattgattgagctctcagtcctgtcctgcgctcaaagcatccattgtttcatttaaaccacagcaaacagtcatagaggaatgattatgcccattacagagatgggaaaactgaggttcagagaggttggccagcttacccaagagatcagagtgagtctgaggcacagcttgtgtctgtctgacactttgccacattatcacagaaagttccaaccagggtactcttcagccatgctgagaatgaatgctacatggcagtgactttgtcatgccaccaaaagaaacgctgaattgaagcagggagaccagagagatctggctgactcgatgacctcatgcctgaattatggccctagagtggtggccaggggtggggacagaaaaagagccagctcctggcctttgatttcaacttctgggcaaagctggtggcccctggctccatgggatagagattagggctatttatggcctgggaattgctagtctcagctcagcatacaggtggcaggtgataaggtgtctgctcagtaataagctcagtgggaagttaataaacaccattctgttcagagacgcaattgcagattcaagcaggaagtaagaggaatagctaaggggccctgggggtggcagcaccacctgagttgagaagcagctgccctaaggagttccttccacacccctgcaatatcaggggaaccctgaggagttccttccatgcccatgcagtgtcaggggagtcgtgaagtcagtcagtcccaggctcttacgatggctcagctgcttcctgatgcgtgaccttgggtgagtcctttttcctgtgcccaccttggctgcctcctgtgttaaacagagataatgagaattaaaataatggtaacagccccaactttattaccatgctacaaatgcgtaagcctgccgtcctgtctaagaccaacacatgggactgctatacatggttcttctcaaatccattgttttcttttctggtgtaagtgaagaattgaaggcttatggggtcggtctacagaccgttattgagttcctacagaatacccggttctgggcttggcgctggatcagtcaggccctgttgggtcttgcactcaaatgacaaacgtacaaggcttacaccgtgtgtcagatggcaatggtgaagcagcatcagggagttggggaggagaggtggactgctttttttattggagggaggtcaagaaggatgcctgaataaggtaacatttgagcagagtcctaaagacagtgaggggacaaatcatcagactagcaggggaaaaagaactccaggtggggggaacagcaacggcaaaggctgtgaggtagaaacgcaataacgtgtttgaggaataaggaggccagggtggctggaatggaggttagcaagggaatgagggtagggggcaggttctgcggggcttttgttaggatttctcttggaggaaaggcttattaccacagtgactgagagtgctgccattagcctatgaccctcagctgtcagcttgttcagaggtggcttagctgcagatggctggcttcccacatccgatgactgaccacagtagggatatgagggtctgaccatttctgcccaatgctgtccaactctgatgggccattccagttccaaggctccctgcgggactgatggaggctgttcatgggactgtatccctccctggcttctccctctgcccagttctcatgcctttccttcctttccactggtattgatcccaagggtacatgcttagtgccatctcaggactcagtttctccatttagtgtgattgaactacgtgcatttgccagccctgtagtcccagctactaaagaggattgcttgagcccaggagttcgaggctggaatgagctatgattgcaccactggactccagcctgggcaacatagcaagactccgtctctctaaaaaaagaaaaaaaaaaaaggtataaattgaactgatgaccccaagggttctttcatcccagattgtgtaatataaggccattctggctgggatcagggaagccctccctgtgcccttttatttctaaaattcaacctgcaaaagctttgtaggaaattttaaggacgggcttttagtaagatggggacacattgaagggtcgtggccagaggggaatgtgatctgatctgtcttttgaaaggccactctggctgccgtgtggagaagcaggattaccgtggactctggaaggccaggaggaggttcttacaatggtttcagaacaagaggacaagtgtctttgtgtccttggacaagccacttccccgtatctgagactcagtttctccatttagcaaatggaacgatggcctcaacatgctgaattgtttgataaagaccattctgggggtcagagggccctcctgatctcacagctagaaatgcaatgactatgtctgctatcaccactgttactactgagaacatgtctcgatgaaagcaattctggaaaataggggagcaaaagaccctctgtttgatactttgaggggtcttctgtggcataatcttcccaggaagatcacagatttccattgctgctctaatttaacgggattcactctttttctgtacctcctgtgtgccaggcccagagctaggcaccagggatgcagctgtgaacagactttgtcctgtcctcatggagtttataatttggtggggaagacagacaagtcgatgggaaaccacaacatggcaaaaagtgcctgatagcgaatgcacgagcccatggatgtacaaaagaaacacctaaacaaattttagaggtgaagccctggaagaaatagaagatcataccactgcatccagcctgggcaacaaagcaagatcctgtgaaagacagaaagaaagaaaagaaagaaagaaagaaagacagaaagaaagaaagaaagaaagagagagaaggaaggaaggaaggaaagaaagaaagaaggaaagaaggaaagaaggaaagaaagaaagaagaaagaaagaaaagaaagaaagaaaaagaaaagaaagaaggagagagagaaagaagaggaagaaagaaaggaaggaaggaagaaagaaagaaagaaagaaaagaaagaaagaaagagaaagacagacacagaacaataagtaaaaattagcaagagagaatgggtggaaggaaaaggagtccccggcagaggaaacagcctgggcaaaggcccggaggtgacagagatcaggattgttctaaaagttcaagtgtttcgaagtggtggggcacagagtgtgagagatggagtcagagatggaagctgcaggggatggcagggcttgcatcaggaaaggcttggcttaagagttaagaccttattggcttagtcgtgtttcctcattcaatgctgcagctgctcatgtaatcaatttgtggcaccagttctggttcgcatggctaaaaagacacccagagggccctctgatcccaagaatggtctttatcacacaatccaaatatgttgaggccattcattccattttctaaatggagaaactgaggcccgggcaatgagaagtggctcgttcaaggacacactgcaaagctggggtatagtattggacttgcacccttttctgcctcatgcatcaaggctttgtccctatagctgtgccctatcatttgagcaagcagctaaaactcaggtaaagcccccagcataagactggcatgtagtcggtgctcagtcaatatcagttctcttctttctttccacaaaccctagctctgccaccactccttggctgtgcagactttgggcaagttgtacctcctggacctcctcttccttttttttttttttttttttttgagacggagtctcactctgttgaccagggtggagtacaatggagccatctcggctcactgcaacctccccttcccaggttccagtgattctcctgcctcagcctcctgagtagctgggattacaggcatgtgccaccatgcccggctaatttttgtacttttagtacagacagggtttcagcatgttggccaggctggtctcgaactcctgacctcatgatccgcctgcctcggcctcccaaagtgttgggattacaggcgtgagccaccgaacccggccggacctcctcttctttgcaggaagggtaggacaagaagcctctgggaacttctaagaattgaaaggggaagatatctattcaggtgctaggatagtcacacgattccttttgttaagatttctactctccagggcagcctgggacattttgctttgcccaatgccctgcagtgcaaattgcaaacaagagcagggggccaaaagggagaatgcacaaaaagccaaagtggtcccacagtgtgtgtttgcatttgggttttgtccctgcaggagtcgttttccaagccggcagctgcctgtctcctttgaagagtcttggaagcagccaccatccatcattcgcttggcatgactgttaagtatcagcgctcagggctgagggctgtgggaaggggctcccagtggggtcagctcagggccagagaattaggaggcaatcaaaatggagggattgagcaaaccagttaacacgcaggctgtgagtgaggtggcactcggtctgatccccaggtagtgggcacttgcagcttggctgccttatgaatgttctaggggcttggtagcatattcttcttcttcccttgtggaaatggtcctcccctatactctgcaccccttcccagcctcagggttgggcctggcctggacaaccagcactttgcaatccttctgtccatacagaacagggaggatggttatatggtcttcagttggtccaataagacttgggattctgctgtggttgctgaattggtttgaagaacacctagagttagttgcttatggtcatcttacctgcatgaggggaaagtcttcatgaaaataaagctatcacaaaagaaagataccaagagatggagaaagacagattcctgagaacctagatccagccatacctgatgctgttcccttatacgttttttttctttttgctcttctgcagacagtgactgaacccttagactttttctgctatttcagcctataagctccttttattggcttaaggtggtttttttgaattggacttatatcaagagttgccaagagtccttactattacactcattaggcatgtaatttctcctccctggacctttcttatctgtaaaatgggaatgacaaaaacatagatctattatgtagcttaaataaaataacacaaataaagcacttatcagtgtttggctagaatacatgctcaattcagctgcgattaatccacactcatccttcaagtttcaaaaagttctttctccttcacttgttctcgtataaacggttcctgtgaagtttaaatgaggtatcatgagggcaaaatgcctgccatgtagtctggcacatttataatgtagctgttaaatggttttctgattagaaagttatggaagcccaggtaagggaggactgcagggccaagaatggaaggcagggagaggtggtttgagtagtatgactgtccactctgtggaatggtggtgaggctatctcaactggcagctcagcacttagcacagtgctggagccactggcatgagtgaatgtgtgtccacatgagagaaccaatgaatagttcaaccacagccaggactttgacttgatctcgtagggagctgtgcaagttcccaaactgggcgctgacaaaaaagcatcctttacaaaggacccctctgtagcctacaggggctggagaggaggtggggaatctggagctgagtgtgcaagagttgcctggggttggggttgagatggaaacatcaggggcatggatgaaaacgagagatctgatgtagagagctctgaccacacttgacacaagaccatgtgcatgtgagtgtgtgtgtgtggggtcttgctggtgagcttatgtgtgtggagtgtgcaagtgtgtttgagtgtgtcgagtgggtggagataggtaagttcagtgtgtgggtgtgtgtgaggaagagagtgtgagttccatgtaagtgtatctgagtgtgtatgtgtgcacactgggtttgctggaagcactggtgagacggctctttcttgtgcggagctctggccacacgccaaatggtaatcatcagctttctttgccggtcttccttgaaggtagaagttgggtctggtgaaactctgtctccgtagaccctggcatgctgcttcatacatatatgtggaatgaaggggtgaaagcgtgggagaaaagggcttctggcccctgctccaaggagctcccacaatgatcatgggcatttcgatggaagggacgtctacactgcactgctctataagaaactttgcacaacaatcaaacttaatgcttgcaacgaggctaagcagatctatatctgtagatcatgatctatactaataacactccttctatttaaaaaactatattctgattacaaatgcaatacatgctcattgcagtaaattgggaaatttaaaaaaaaagaagaaaagaaaactcatccataattccatcccctggagataattactattctaatttttatgtatatccttccagagtcttttagaacacatgcacacgtatattactttcttctttttttgtttcagtagggctcatgtggcaatatcatttttaaactcacccaataactcttgaatccctacactgtaaaatatcccttgttcatattattttgactggctgtgttagatttcatgattttcaaaaatgcatttctgtatttttgccattttggcctcttctttacaattttcagccattctaaatgatgttcctggaatgcactgttttcatttctttctgggcctttacatggacttttccaagtgggctccttttcccacccttccttgggctcattcgagttctttgaggtcccagcctagatgtgcctcctccaggaagtcttccctgatgcatccatggtggatcagatgccccctcctttctgtggcgtgttctccttctctcatcacgacgtgtgaaatggatgcacatagacggcttactccatccaggctggactaggagttccaaggagcccagggtcccatcttactcatggcagtacagtgcagcacaagtaggccatgaataagtattggagagatgtggaataaacactatgacatatgtttctacacagctacctggaatcatcatgaggaaatactggcacccgcatgtgatacttgagctgaaatgtgatacttgggcttagcatccagtttcatctgattccaaaggattgtttccgctttgccataccttctccatcccagcgcctcggcttgtttttcccattccttccccccaggctctcagcttctgggacaggccaggggcagaggaaaaggagtcagggagaggcctctgcaacctgggaagtagagggcatcacctgctctggcaggaggcgaactgggaagactcctgtgctgacagcatttcctgttactctcctccgggggagaagttggcctccttccctcttgctggggactcacaaaatccgatttgaaatctactcaagtgtacattaaccaacttcctcttggcaccggctggggagcctataattagagcagacaccataccatttagtgggtttcattcacatgaaaagaaagtgtacttgcagagggagacggcttcagaagcaaacttctgggaacattctccagagaatttatgcttgcagtgtatccaaaggacccacaggccaactgcgtttctaagtgcagaggttatggccggctggacttgggtggggtggtgataccctgtcgtcctgaaacacacagggcttggaattgggcacacttgtattcaaatccctgctcaagactcaggtaagcaatgcaacttctgtaaggcagtttcctgatctgtgcatctgggacagtatccattagcaatctcacagggttatgttgtctaggtgtaaatgagatggtggagatatagatgtatatgccagagaaggttctctataataacaatacttactactactgtgaaaaccactaccactaacaaaataaccagtatgtattgagtacttactacattcaacatccagttctaacactttggatgcatgaactaggttagtttcacaacaattccatatggtaaataatattaatgtcttcattatacatttggggaaagtgagtaacaaggaaattatgccacttgcacatgatcacaggctgatagctttttactaatatttcaggggatggaagaaaacgtgatggtataagacagcatatgggttgactcatggaatgtataagctcatcaatgctaagaatcacatttttcttattatggtactgggacccagaaaagggagagagttcaagataaactctcatttttggatgtacctaatataatctaggggcttttacagggatgattttattttgttcttgtctcctggagattgcaggtgtgaaagaatagattcagagagcagcagtgtatcttgcacgaggtcatgcagagctgtggttacaaccctggtcggtctaattacaagttaattactctttttacaatgttgcaaggttgcctgggtggatcaggactctttcagatgcagaggctagtttaagggaagaagaaaacttgttggatcattagtaggccttcaggcacggctgaatccaagcgcctgaataaagtacacaggcatttattctccagcctctctttcctctgtgatgacttcatcctcaagtgattcctctcttcattgtggcaagacctctacttgctctttggtatctggctgaccacatcccccctccacccagtttcattatctcaccccaacctagaagactaggtgatatagtgttcaggggccagcctcccaggacccagagcagaacagagaataaagtagaatagacttgggggttggggaggaagaagaattaccatcatcctccccatctccccacatccaggctccagtctcagttccctctttggtgctgcagatttcctgcagaaaataaactggagactgctttgaagttccatcttcatcctagggactgaacagtctcctttatcctcccaggcattggctgggtccccctccaacgacccaatcaagaagaagcctgacgcactctccatctgacccgggatccctctctgtcaaaacccacgatgggtcagggcccactcatagatgtctgactttggtttctcctttccccagctgctgactcaacctcttgaccaagcccatccaatttccagtgatttccttgggctctatttcctttctgcttatactccagtctctacctctttttctgtccaaccatctccgttcctcattcctgccccatcctcacttccctatttcttgtcccactaaacacccctatcttggttcctgctctttgcagacatggcactgggggaccaaccttgctcattccttctctgcatccttggcttctgcctgagcaccattcaccctctgtgtgattaaaggcaaattaccttccatgagcctcagtctactcagctgcagaaatgggaatgatcctctttcatccagtggctgtgttgggagccagagcttggcgattgtatttacagtgacatgagcacaatatgtgaggaattaccaggaggccccgggctgccacgagactggatttgtactgatatcgcccattacgaggtgtcatgttgcatttgcaggaggtggctgtatggaattccactctcttgcactgtatgaaatattcacctgccttctctggaagggacgtgggcttcttcttcatttcctgactgatccacctcagaggaagccaggctgcaggctgtcactaatgcaaggtgatgccaggatccaatgtagggccttggggactgggacagagcagtgaggctggtgggtgctgcagaatggaagaaggggatttgaggcccttaggaacccagggtcaattagagcttcttacctgctccctataggaaaagatgcatggcgttggatggagttatgagttgagttgtgtcccctccagcattcctgtgctgaatccctaactccagtacctctgaaagtgaccttatgtggaaatagggtggttgcagatgttattaagtaggatgagattatgctgcagtagagtgttccctaatccaatatgactggtacccttatataaaggggagatttggacacagacacacacacacgcaaggagaatgccatgtggagactggagttatgctgctgaaaccagcaaactattggaggctaggagaggggcctggaacagagcatcctcaggggacacagctgtgccggcacttgattttagacttccgccttccagagctgtgagtcagcccatttctgttgttctgtgccactcagtttgtggtgctttgttccagtagcctgatgaaatgaatacaaaaggaaacacacaggtgagcagagggctgaggggctgctgcgtctgcaggcatagaggatggactccagggtcagtcagcattgacttggaacatgagagttgaagttttaagagggaatttggtgttgagggtcagaatcagggctctagagataagattcagacattcttagctcctcatttcatggcgctgggcgagtcatcaagcctccctttgtctcggttttctcatccatataatagggacaacaatggacctcacggtattatgagattaaacagtattacaaatgttaagaacttatcatagtctgtggcatgcagtacacatctgaaacgtcatagctttcttcattcctagttgagtgaccttgggcaagtcactttgcttgtatgaggcctcaatttcctcctctgtgagagagggttgataatcctgaccttacttttctgttaaaagcatgtcataaggtgtaaaaacatctgtcccaataactggtagaaagtaaggggaaaatcactacttagcttcattcttcccttttgagttccccagcatctgcttgaatacctctagtgatggacaactcattacctttcaggatgttcatttctattgggcatagaagcctcacacacacatagaaactttatataagagattttctgaagttccatctatatgtgatgcctactcctcaagctcccattttacagatgaggaagctgaggccgaggggaccaggcagaaagatgggagatgaggcaccccaaccgctcccgccccatctatgccctggcactcacacagactagctttccttcgtttatgtctgcccatctcgtcttgaaactctaggagtatgtgtggaagtgggggaggaacgagagcatgtgagaatgtggggtgtggcccattaaaatcacctccgttctggcaccctcttttctgcacttactccttcccctccatgtactaagatacgaaacagctcacaccattccctgcctctaactttcagtggctcccaattgctcttggaaaaaattccaaaggcctttgcttggcaaagaagggtccatatgacctggttttggctcttttttcggctccatcatagatccctttgttcttgctccaacctcaaggcctcttttcatgtcttcagatacagcatcctcatggagcatcctcatggtcatctttgggcctccccagtgctcatccttctgcctgggcatcacgtgctcaacctctcatcattcaggtcttgatctgaagcgcacctcttcccagaagcctcccctgcatcccctagctgggtcagttcccacccccatacgtgactcttcctcattgcctgttcattccagcatcacacatgacaccagtggcactaatagatttattcttctgcctctttgatgaatgtctcctactttcaacagtatgaaagcccccatgtctattcttcttcccaattggaccctcagtacccggtaggtattcagtaactatgttttgaatggttgaactgtaaatgggtgagtttgggtgtggaatgtgtgagggctgagaaacgactgtggctcccatgggactgacttatgtatcaggtgtgtgactctgagaggacaaattgctcatcttgagatgaccagaaccatagcctaaaacaaacaattgaagaaactgtaagagtttaacctggaaaggacaagacttggggaatgtggcaagtaccagtgtgccactgaagacaaggactgttcctgtttaccatcctgtccccagaatctagcccagtgtctgacacacacaatatagactttaggaaatatgtccccagtgaattttgaaagagagaagaacacctaagataggtgaagctctcaaggttcaggaacacagatcttgcctcaatcaaagaaaaccattctcatgtttagagttgtccagagctagcacaagtttagggtgggtagggggtgacctacactgggggttcttcaagttccttcgtgctctgagacttttttttttttttgcaatggagtttggctctttttgcccaggctggagtgcaatggcatgatatcagctcactgccacctctgcctcccaggttcaagtgattctcctgcctcagcctccagagtagctgagattacaggcgcctgctaccatgcctggctaatttttgtatttttagtagagacagggtttcaccatgttgatcaggctggtctcaaactcctgacctcagatcatctgcctgccttggcctcccaaagtgctgggattacaggcgtgagccaccgtgcccgacccttgctctgagacttaatattctttccctggctgggcagacatggacagaaaacagagttgctttcccttctcttgtttgggaggtgtagggagttctaattagagagaggtgaaacaggctagtttcccaccttaataatcctgtttgtctcaggcatgggtcttgaagaagcagtgcattatttaggaaagattctcatcccttcttctccctccttatgtcctctgatatgagtcctgcacaagtcttgcctctttgtttgtttaatgatgatttccccaggtcttggaacctgtctcagaatgcttattgtctaagtcacaacaaaccatcatgggccttataattaaaagccagctttaggtctctctgcttgggactggatcttggcatcacctgcatcctagaaagaagactatttggcagattactaagtgggaatctggtacccaagaagccagagaagaagcacttcagaggggttaggggagcctgggcattttcccctggttggtggggctggccagggcagattgtatgtttaaaaccacccttgattcagcatcccagtagaatggaaataatttggactcaagcagctaaggttcagcgtttcacctccccagggtgatctcaaataagtcacttcatcttgggcttcagtttccttatctgtaagttgggggttgcaacagcatttagctccctgaggtgctgtgaagagtgagtgagtacagtactgagcacagaaggctctggatggtcaaccttatgggaggcagagaagtatttctgatgcttttgaatttctgctgtttggcccagtagttccctaatagtgtacaaatgccctttttggcaattttaagtgagaaatgtggtcatttctttcactccttaaaaaaaaattggccgaggaatctcagaatactagaagagggatggatgacttcaacatttgtttagcctgactcccttagttgtggaaaagatgcttgtctgtggccacatagcacgggaatgcagaagcaggattagaactcacttttcctatttgccctcttgcactttctaggtgaagatggcaatgacggctgcagtccaagccctagtgggcagatgaggagcagcccctctccttaaaaataaagccggattcctaacattctcttcaacccacggctgtgcagggcagagtctcaacacaggaattggaacataacaaatctgccgactgccagctttgatctcacaaggatggagttggggaggtgaagagaaagtaaatgctctctcgactttccaaaggaaaacaattttctttcttggtaactgcaattacttgaaaaccatgtcaaaacaataatgtgcctccaatagtctcccactctctctctctctctctctctctctctctctctcccccctctcctcctcctccctgcttcctctaccttcttctcttccttctgcctccttcgttttgccctggtaataaggaccatggacagagacacataagctccgcccacacgcccttagctgacctatgctgggaaagaagggcagtggtcgatcaatacccaagatcaagtgagcttagctcctcacgtgagtatttcagaaggcattgctttttggttgcatttccttgtaagttggcgagctgcatactgatggacattcttgagaagcttggagggcactcatctctcagggatgccctagaaaggttgtctgcactagtgagatttgctgctcattccaattaaggtccttctaactccaaacctctttgaataataaatagataatgagactgagaaaaataaagaatatgtcattaacaaagccgcagaccacagttcattggcaatgttggggccagttagctctatgattgcttggacaactgtgtctgtacctaaaacacccagttttaggtcatattcccactgtctgatcactgaacagtctgggtgagaggtcaccagattccagctcacatagctaaataagacctttttgtaggttctcttcactctcatttaattacagaaacaattgtttgaacagattaatatatcaatttagcagaagaataactgtacaaatgcaaagcccttcccaggccaggataataagaatgcagctctcacctctgccttaatcaatcttgtcttattttaagctcacatttgtgatctatttggggttcatgtctctgttattcatgtctttagaaatcttgtcttgcggatgtgatgggcagtaaccaaaatagtatctacccgatgagactctcagatcctcgagggcagagtatttacctcacttgcctgtatactgtcaaacacttagtaattgttcagaaaatatagaatggatacattaataacgaatgaatgttaaaaaggaagttgaatttaagcctagtgagggtaacactttatgtctttttttttcctgttgaaaacccaacatctagaacaatgctcagtacatagatgatgatcactaactacttgtttattgtatgtgtgagtgtggaatgagtgaataagagaacaaaggctcttttctttgctaactctggaagttagagaaagtaatttattcattttttaatagatgaggaaatgaagtctcagaagaatcaatttatgagaagtcgcttggtgaagtgtagaatgatatacaaatacatatccattattaattgacacaataatgctgtgaaaccaccacacacttcagcagtgtatggtaataaatatttatggctcaggtaagctgggctaggctggatggttcttctggtctcagctggactttccctttctgagcctcactttactcatctgtaaaatgggcatgacagttgcagagcccattttgtgaagattaaataaggcaatctaggacatgggcttagtctttatgtcctcaaatactgagggctggccaggacttgagggacataatggagacaaaaatagacacgattcttatttctgttggaagcaggatggtgggggtgagggtatagatagacatcatacaaagaaaggtggaactgagctgtaattgctgcagtggagggagggtgcatgttgttctctgacagtttccagtgataaatttaacctcataagggaagtcagagaattctttcctgaagtgtcactcttaggctgacatctgaagaagtgacacctagtaggcactcaataaacgttaattaccatcattatccctttcttcctcaccaccagaggccaacttatgagcaggaaagggcaggatttagcatttgagcaccagctatatggcaggcaattttcacattattatctcatttaaccatcacaacagtcccccgggaagtaggtaggattgttattcttagctgacacactaagtctcagataggttcaagcatttttagaggaactgacaacactggggttaaaatccaggtctttgggactccaaagttctcttcccctgtagacacagcatgcagtttacaccttcgtggtgtgcctgatggacagtgggagcctccactgaatctcagaacactatctgcaaactcctgtctttccaaaggttgagcactgcctggaatgtcaccattagcttgccagctctttggtcctctttttggtagggtccattttttgcctattttatgacagccaagaaaataaagcagtttcccatgagtggagacacatttaagatcttaagcaaaggaagacctgaattttgagaaagaagagaaatttgggaggagatacagtaaaaggcaaaatgaagaagatacacagacccctccctctcccccagaagattagagagtcctggggaccatttaattcaacccagtcatttaacgactgagaaacctgaggctcagagagggttaggtatttgcccaaaggcaaacagcataggacgtacagagttagggacttattccagaaattcttaactgcttttgtgctttttttcccctctgcaaactccctccagtttggggggtggcttaaaatctcctcaaggaaggcagcagatttatgggttaataaacatttacaatgagctcctgaaaaaacagactcaggtagacaggaattattcattcaaattaactataaattaagatcaacctaatttaggcctattaaaatggaaagcatattatctctcattcaaaggaatttgtatttgatgcaaatagaacaagttcctaaactttagaaatgttcttggatttttcatctccgtagttaaccaacgaagaatgggtcccccatttaaaaacaggggaacataaggaacaataattagttatgtaaataatgtggcattcttgtttataattagttcaagaataaaataaaattcacgcatgtcacaggactaattttcgtatgcaaatgaacaatcaaaattataaatggtaataatgcagtttgggagatgtgacattctcaatttattagcaggggtgccagttacagctgatgatggctgacgttgggagatttcaaaggtgcctgggtctggaaaattctcacccatcaagaggagaaaatctaactaaaatattttcacccattttatgtcactgatggctgcaaagtgaacccagggcgcctctgtggctggagagacaggtgctgcaccagggagacaggagtccaagtgaatttttgaaaagaacgctctgaaatttggctggtgaaaaaagcaaagaccaggcattgcaacctgggctctgacctcaacaacgtgtgtcaccttgggcaggccccctttgctgcctcctaatttccccatctagggtggaagttttattaaagaggaggagggagttttgaaatcaaactgacttggaatcttggttctaccacttgctaactgcagggctttccttaacctttctaccttacctatctggactcatgtagcctcatctggtaagtgacagcgatattctatatctttaggcagtgccaaattaccttaaagaagggctaagcacatgtttggggcactagaaaagtagagtaccaggggaagaaaaagtgtgagataatcaggaggtctagaatcaaaagctgcttaaattttggcattatgagagcgtcgtgtcattctgaaaaataatttaaaagtacttaatatatttaattgaaaattatatatggaatgtatgggtgtgcattatatatagaatatgctttgctccttggaatgctgtgagattgaatgcaattatacatataaaataattaacacagtgcctagaagttggaagaactctgtaaatagttgtagcagctactgttggtaaatgagtaagctacattccaaaatatctgcagtccttttttaagccccagtgttctaggattctgcctggagggaggatgcttaatttcagataatagctgcatcaggaccaacatgggccaatggggatttccaaagaaggatggtccaaagcacgctgggaaagttggcaggatttgccctaagcatcactgaagttgatgatatgatgagacacagctcatctggtctcaaactatctcccccagcagtcatggtacccaacattttgcaactagaaagaagcccatatctgctaactcaccaagactagaaaccattcttgatgtcactatgatgtacatcattttacctaagatttacttatctacctatatccatccatccatccatccatacatccatccatccatccatccatccatccaacatcaggaaccttctgaaggctaactgcaccatatggtggatatgatggatagattttagtcctctttcgttgttggcactccaaatttgggatgggaattgtcattgagcagctattctgtgctatctagacgctttagacacattatcccacttaatcctaatgacggcactaagagctatagataacaatgtttataaggtaataatagctacgatttattgagtgttactatgtactggccactgtgcttagccttttatatgagatatcacatttaatgtccccaacagttttgagaagaactcttatttctttgatttaccattattgcccagcttcagaaaggttaagtgactagcccaaggtcacacggcacattagaggtcaaagcaagcctctttccctggtctttgtaattccaggttggtcactgtctgcttcactgtgcctctagctaactgattttctcttggagggaggcatgcgggctcccaacctcactagacaatcatgggaggaggaaagacaagggctttctcacagagttaactctccactccttgccccctggggaagggcaccccctcctgagcatcctgacaggtcagcctgcactcaaagtagcctttcggggggcccttgatggctcccagatgggaacgcacacagctgtcaggtgcttccgagagtctctggatcctaagagcactggcggtgtgcctgtaggattaattgcttctctggcttccagcagggaagcggggtgtggtaacatcttggcttggttaaggatgaaggggcaggcacacaggtggcagagagcatgcctctgtagcacaggatcagaggaaactatgtggctgagaacagctcctggtaggtagggaagcccatgaggacctcacttcccctagaaggaagatgtcagaagctgatgtcctttccccctgtgcagttctaaaattatgtaactggaagaggtgccacaggaaaacctgtttctatcatccttattcgttctgtgtggtcttcctccttgtctttcttacaattcttcttccacagttaatttttttcaggcaccttctatatctcatgctctggaaataccaagatgaaccatgcagaccctgaccccatggagttgagagtctggtggtggaagacagacatcatcaaacgctggcacaaataaaggcacatttatttacttgaggggttacatgttaagtcacggaggcacagattctagaggagccagtagcagggcctgagcttggtccagggttggccaggaagctctttcctgcagaagtaatgcttgcactcaggaccaaaagatgaccaggtgaagagtcacctcactccttgaaacctcagtttccttctttgtaaagtgggatgatagtaacacctacattccaggatatttgtgaggataaactgagatgacacaggtgaaaatgagtagtacggagtctggtacatagtcagtgcccatcgtatcatggctttggccatagtccctcgatgtgaagtgaagttcccatagattggaaggcctatcgttgacttagaaactgctgcccaagggacaaagaagaatgcaagcccactatgtgaaatggaagcacacagaaaaggaagggcctcactctgctctctctcttctgtgtgtgtgtgtgtgtgtgtgtgtgtgtgtgtgtgtgtgtgtatgatgagaagtttgcacagagaagctggtgtttaggccaggtcctgaatggtagatagcagtttacaagagaaaagggggaggaagggtgtcagagataaaaggaacatcaatgcaaagtgatacaaggatgagaatgagtgtcatccgccttgtcagatgcctggggaaattccaatgggcacatggaacagatccccaaacaaaacaacctttaataacacaatactattactcctaatggcaataacggcaaaagcaataatcacaatgaccacaatagcaacagccgttaccatgcattgacaggttactctctttcaggcactgtacatgggtaacttcacctgaaatgctgaaaataaatcttgctcattctttcctgggatatagtgaatgacttcatgccctacattgtatgggctacccacataggtgaggaattgaggatacagccatggaggatttttctgttaaacctcagaagggatgctctcaatttctgcaaggctctcctgggcaacatgaacggtccagacaagttcattcatttttttgtttttctggagggttaaatgggggatagagtattcaggaggtaggtttagctcagtccaaggatggctacaaagagctgtggtaggtagtgctctgacaaagagttccctgtcgtggggatattcaagtgtaactcagttaatttcttgttggggatgttctgagcatggtcagaacaaagagaaagggaaattcagggggaattggtctagaagatcccttcaattccaggatgctgtggtttcaggaaggcaggaatgatctaccatgaaaggtttttacaacagtaggaaacatcatcatcttggctttgcctgtctccaggaggcttgaatgtgatttgcataaccacagggggatggatgtcttgatctttcacagtttttttccagcccttagaatcattctggtctttgcttgcaacctcctttagaaccatatcctgagccacctccatccttctcccaaattattgtaacaacttctgagtaggtcccctagcactctataatctaccctccacacagaagcaaaagctatcatataaaataaaaatcggatatattttccccctacagttgtaacttatgaccatagccgtccccaacccaactggttctcccattccacctcccctcacctaatgtgcacaaaccactctcccttcttttctgactcacaaacattcagggcttttgcctttcctctgtctgagccctcttcccctaggactttgcaaggccagtttttttctcatcgttaaattcccagctcaactgtcaccccagacagggctctctgaccagtctccagtcactccatccggacgacccttttaattttcctttcagcatttatctagctgggcctggtgatgtgtgtctgtagtttcagccactcgggaggctgaggaaggaggattgctggagcccaggagttcaaggctgcagtgagctgtgatcatcactttgctccagtctggatgacagagcgagaccctgtctctaaaacataaataaataggccaggtttggtggctcatgcctgtaatcccagcacttttggaggctgaagccagtggattgtttgagcccaggaatttgagaccagcctggacaacaggtgaaaccctgtttctaggaaaagcaaaaattagccaggcatagtggtacatacctgtggtcccagatactcaggaggctgatgtgaaaggaccacctgagcctgggaagttgaggctgcagtgagctgagactgctccactgaactctagcctgggcggcagagtgagaccctgtctctaaatacataaataaaataagtaaagcacttttcagtatctttctggaattcttatctatttgttaacatatgtatggtctttttctgctgctgagaggtgaagccagctggacttcctggctcgagtagggacttggagaacttttctgtctagttagaggtttgtaaatgcaccaatcagcgctttgtgtctagccaaaggattgtaaatgcaccaatcagcaactctgtaaaatggaccaatcagcactctgtaaaatggaccaatcagcactctgtaaaattgaccaatcagcaggatgtgggaggggacaaataaggaaataaaagctgaccaccccagccagcgggggcgacgtggtggggtccatttgtaggttgtggaggatttgatcttttgctcttggaaataaatcttgctgctgcgcgcgctctctctctgggtgcatgctgcttttaagagctgtgatactcaccaggaaggtccgtggtttcattctggaagtcagcgagaccaagaacccaccagaaggaaccaactacagacacactgctatatgtaagcttcttgggagcagggtcttggttttttttctttctttccttcttttcttcttaactttcccccttccccttccctttcgcctttccttcctttccttccttttttttttgagacgtagtcttgctctgttgcccaggctggagcccagtggcacaatctcccctcattgcaacctttgcctccagagttcaagtagttctcctgcctctgcctcccgagtaggtgggattacaggtgcctgccaccacacctggtaaattttttgtatttttagtagagacgggatttcaccatattggccaggctggtctcgaactgctgacctggtgattaaataaattcgattaatatataacatacatggagaaagatgtacaagtcatacgtgtatagttaaatgaattatctcaaacacactcctgtgtaaccagcaatgagctcaagacactcaacatttccagccccacctcagtccccaacccccaaaatgttctcacattcccaagtcgactccccaagggtaactgccatgctaccttccaacatgtagataagtttgtggagcttttgaactcttacgtgggtagagtcacacaacagtatgtatgtttgtgaccagcctggccaacatgaaaccccgtctctgccaaaagtacaaaatcagccgggcatggtagccggtgcctgtagcaccagctacttaggaggctgaggcaggagaatagctttaactcgggaggcagaggttgcagtgagctgagatcgcgccatcacactccaacctgggagagaagagcgagactccatcacaaaaacaaacaaaaaaacaaaaaacacaaaaaaaccaaactacaaatacatacaaaaatctagatgaaatggacaaatataattttgagtaaaagaagccggatgtaaaacatacatactgtgtgagtctatccacatagagttcaaaagctggagagacttatttacatgttggaaggtagcatggtagttacccttggggagtcgacttgggaatgtgagaacattttgggggttggggactgaggtaggggctggaaatgttgaatgtcttgagctcattgctggttacacaggagtgtgtttggtttgggagaatttgttgagctatgcacgtataacttgtacatcttttaccatgtatgttatatattaatagaatttatttaaacatatttatagggtccagctatgtacaaactgaatcaagattctatgtacatcagaatcaagagagagtgagttcttgacatcacggagcggtctacattctagttcatgcggtggacctgctgggtggcctcaggtaagagactcatttcccttatctataaattgagaatcctaactctttcccctaatcaaacccagctggtaaattcccccttcaccgctcccttctcccctcaaagagacaagccgtctttgccatatgcctctttcttttttccacccagaggtacctttcaaatgctggcccagaaaggtgaggcaaggaggggacctggcctccatctctgtgaatcccacagccctcctcctgagatctgcaggggtagcatgaaatatttaaaagctcaaattgaaatcttgttagagccaggtcttgtaaagccaagttctccaaccccagaacatcagtatctgtttgctggtgtcatttagggaccccggctttccaaaccattgactgaaactttctgtcaatccaacacttttagggtaatttaacttaataatacctttgtcggcactggcgcctgtatctgaagggtgattaccatagaagttattttaggttgtttaatggaatgtagtaaattctcaattgacagggcagatcctcaaaatggcttttcaaagtgtttacctttcaaagctttctccctcactttaccgaacttactactttgagccagcgaagacttcataaattattagcaattgttctcccccctgtgttcacatgcatcattaattctttgtaaaaagttcaaactgtccggggcttaattgttatcacttggagaacggctagaaatggatgcaggctgtattatttctgtcaaaaattttgacttattgctcttgatattttacccatcacatcacatcctcggtacaggagagaggaaaaaggagagggggaggagaaagaacataaatgcgttttcttgaaacaaaacaaatataataatacatatatttctgaggagaaaagtcaaggattcatctgacaaaataatagttttaatcctccaaagagagaggaggagggcagcattagggggaaatttctattgtaaattctattgcttcacactgtacttttattctaagttttgaaggttgtataattctaggaatctaatgtttaacgattctgagatattgaaattttatgagtccaaattcccaaggtgtttgattttaaggataaattaatcccaccgtccagtattcaggactgctaaaaagtatagtagaattagaaagatattgacaataaccacagaaatagctaagctttgttgagaccttaaccatatgcaggcactgtgctgagtgcttcatgtgcagcaccttattttattttattttattttattttatttttttgcttttgctaattttttaaaattgtactttaagttctggggtacatgtgcagaacgcgcaggtttgttacataggtatacacatgccagggtggtttgctgcacccatcaacctgtcatctacattaggtatttctcctaatgctgtccctcccctagcccctcatcccccaacaggccccagtgtgtgatgttcccctccctgtgtccatgtattctctttgttcaatgcccacttatgagtgagaacatgcggtgtttggttttctgttcttgtgttagtttgttgagaatgattgtttccaggttcatccatgtccctgtgatcccattactgggtatgtgtccaaaagattataaatcattctactataaagacacatgcacacgtatgtttattgcagcactgttcacagtagcaaagacttggaaccaacccaaatgcccatcaatgatagactggataaagaaaatgtggcacatatacatgatggaatactatgtagcagcaccttatttaatcttcatgtcactgtaaagtaggtactgttattaaccccttatatagctgggaaaactgaggcacagagagggtaagtaacttactcagggacacacagctggtaaaaagcagagttaaactctgacttcaggccctgtgtgtgtagaacttaacgtatattgtgccccatctcaagacactgctcttttgccccacctggcatgctgtggatcagtgtagaagtgatccacattggtatatgagtctattgtcagactacccctgaggcaacccagccctgacctgctttttgtttgtgttgacgttgctcatccagtccagcagatcaccctttcccatacattctacaaggtcatctcctccaagaaggcttcagtcctgccgcaccatcctttgaatcctcacaacagttggtaccagggaaagggataatgaggcagtctagtaggctggccaaaagcatggactatggggtcagatcccttcggttgggatcttacttctgccagtaaatccatgcgctaagcttcagttaggcaagccatttcagcctcagctttcacatctgtaaaatggatataaccacccctgcctcacagaactgttgtgaagaggaagggaggtgctccaagggagctctgtttactgcttcacaacagtcagtgctgaatacatgttggctgttgttctctcttgtcttgtagtgatctcgtactgagagttttgtacattaaagtataagagtcagtattttttttcctagtcaacatttattttcaatgagatttggaaatttccttaccaaataattcaaggtgaaagtatattaaactatatttttaaaaattgtatttttgacaagtgaccattatatatatttatgaggtacaatgagatgttttgattatgtttatcttgtgcaatgattaaatcaagctaattaacacatcacctcatttacttatcattttttgtggtgaaagcatttaaaatcttgtttttttagcaattttgaaattatatattgcattattgtttattattgtcatcattctgtacaataggtcactgaagcttattccttctgtcagctgaaactttgtaccctttgatcactctctcctctttctctacccacctgcttcccccagcctctggtaaccaccattctacgctctcaacttctttagatttcacatataactgagatcatgcagtgtgtgtctttctgtgtctggcttatttcacttggcctaatgttctccaggttcactgaagcaaatgacaggatttccctcattgtaaaggctaagttgtattccattgtgtacatacaccacatttttttaatccattcatctgatgttggacattaaggttgcttccatatcttaactattgtgaattacatttcaatgaacataggagtggaaatatctcttgggcataggatttcaattcctttggatatacaccccacatggtaatcctatttttagttttctgaggaactcccatactgttttccataatggctgtattaatttactttcccaccaacagtgcacaagggttcactttttccatacccacatcaacttattatgtctttttgataatagtattctaacaagttgtgatgatatatcattgtggttttaatttgcatttccctgatgattagcgatgaccagcactttttaattcctcatttgtccattcgtagatcttcttctgagaagtgtctatttaggtccttagctaattttttgattgggttatttattttcttgttattgagttgtgtttcttatatattttttatgttagctccttatctgatgtatggtttgcagatattttttcccagtccttgagttgtgtctttactctatcagtcatttcctttgctgtgcagaaactttttagtttgatgtaacttcatttgtttgtttttgcttttgttgcccatgcttttggaatcatacctaagaaatatttgcccagaccaatattctggagcatttctcctatgtcccctcatagattcacagactcaggtctcatgtttaagtctttaatccatcttgagttgatttttgtatatggtgtgaggtagggtacaatttcactctaatgcttgttgacatccagttttcccaacaccattaattgaagaagctatcttttccccattgtgtgttcttggtgcttttgtcaaaactcagtagaccataaatgtgtgggttcacttctgaactctgttctattctgttggtcaatgtgtctgtttatatgccaatgccatgctttgattactatagctatataatagattttgatgtcaggtagtgcaatgcctccagctttatttttttttgctcaagatgcctttggttatttgaggtcttttgtggttctatacaagttttaggattgttttttctttgctgtgaaaaatgactttgaaattttgatagagcttgcattgaatctgtacatcactttgggtagtatggacattttaacaatattaattcccaatccatgaacacaaaaacatttccatttccagtcatgcactccataatgacatttcagttagacaatgaactgcatagacaaaagtggtctcctaagattataatggagctgaaaaatccctgtttcctagtgacatcttgatgatcctgaccctgtgtagataactaggctaatgtgtgtgtgtgtctcctagtttttaagaaaaaagtttaaaaagtaaaaaaaaaaaaaaaaaaaactagaaaaagcttaaagaataagtatataaagaaagaaaatatttttgtaccttgtataatgtgtattttacactattatcacaaaagagtcaaaaagttaataaaattaaaaattttatgaagtaaaaatgttgccataatgctaaggttaatttattattgaataaaaaatgttttaacctaaatttagggcaacctaagtgttcagtgtttataaagtctgcagtagtgtacagtaatgtcctaggccttcacatttattcagcatttactcactgactcacccagagcaacttccagtctgcaagttccattcctgctaagggccctgtacagttgtaccattttttatcttttatactgtattcgtattgtaccttttctatgtttagatacacaaataccatcatgttaaaattgtttatggtatttattgcagttatgtactggatgtgttggtagcctaggagcagtaggctctactttgcagcctaggtgtgtggtaggctattccagctgggtttgtacaaatatactctatgatgtttgcacagaaacaaaattgcctaaccacacagttcttagaacatactcccatcattaagtaacacatgactatatttgtgtcttctacattttctctcagcaatgtcttatggtttgtagtatacagatctttcaccttcttggtaaaatttattcctacatttgtttgtttgttcaaggcagggtctcactctgtcacccaggctggagtgcagtggtgggttcatagctcactgcagccttgacctcctgagctcaagtgatcctcccaccacaacctcccaagtagctgggactacaggcgcacatcaccatgcctagctagtttttatatatatatatttttgtagatatatgattttgtcatatttcccaggctggtcttgaactcctgggctccagcaatttacccacctgggcctcccagagtgctggtattacaggcatgagccatcgtgcccggctactcctaagtattttagcttttctttttgggactattgtgagtgcgttagatttcttaatttctttttcagatagttgattgttggtgtaaagaaatgctgctgatttttgtgtattgattttgcacactgcaaatttactgagtttgtttgtcagctctaacaatttttttcatggagtctttggagttttctgcatataagatcatgtcattagcaaacagactatttcccttcttcctttcctatttgattgcctcctatttctttttcttgtctaattgctctggctagaacatccagtgttgtgttgactagaagtgttgagagtgggcattcttgtcttgttcctgatcttagaggaaaagttttcaacttttcaccattgtgtattatgttattggtgggtttttcatctatgggctttgttgtgttgcagtacattcctcctattcctaaaaaaggatgctgaattttgtcaaatgtatttctgcatccatgaagatgacaacatgatttttatcctcctcttaatatgccatatcacatttatggatttgcatatgttgagccaaggatcaatatattatgagcatttactatgggatcagtgtctgtgttgaaggttttctgtttgtgacatcacttgaccttcatgaccattctctgagccaatgaatactccattctgcaaatgatgagactgaatctcagagaagttaatcatcctgacagtagtgggaagcctgtgtttgtccacttttctgcagtgccaaaaagggagagtgatgtctttctcttctctgtgtcctcctccagaagctcaatgaagaatatctgggagaagtcccctggctgaccattgtcctatttttggaccttggtcagggaggtagagacattgtctgtctgtgtcaggtgctggtaagcagcagtgcttcttggatgactctagtgaggtgcttggattttatgcaccgccttctgcttgtttctctcttgttgctgatcttcatgggcttcctttcttaatgaggcagaaagagagaagggcaggagtttcttctggattgagggtatgggagggtgggaacagttgggccaggagtcagaacacaggggcttgagttgtggccttgtcatctgtatgactttgggaacatccctttctctttgtaaacactggtttcgataactgcaaaaatatatgcattagatgaacatctcagcggctcttccatactgcttctgttttgaagcagtggaaccagctactctaatgaaatcattatcagaaagccttacacttaagtcagatacaagaggagtggctatggatggagagggagtaggggtgttgattccactccctcgccccactctggtccccgaggtactttcaatgagcaccagtgttccataaagtacagtttaaaaagagataaccaaatcatctctgacctacgcatttcagtgctaagcgggtacagtggtcttggccatttgttttatatctgctttggaatatggctgtacaattctccccagttcacaaacctgcctctgccccaagtcctgtgtgtggactctcaggtccctatgttgccatctttctagatgcctctttgctttattgctgagtgaggaagtgccactatcaacaaaggaggtgagaacattttggcaaatcatagcacatcagagattgtctgggctagtggtctacatgttggtgtcttggtaggtttcatggaaggaagaggaagggtgggggcccaccatccctgcttttacagagcacctgcactctgatttccttccatatgaaactgagcttttaaaattagttttgcttttaaaattagtgttttattttcctctgtttcacacagaaagtggtagagactaatacagaggaatgctgaagctggttcattctggctcacaagaacctattgttctggagaggatgtggagaaataggaacacttttacactgttggtgggactgtaaactagttcaaccattgtggaagtcagtgtggcgattcctcagggatctagaactagaaataccatttgacccagccatcccattactgggtatatacccaaaggattataaatcatgctgctataaagacacatgcacacgtatgtttatagcggcactactcacaatagcaaagacttggaaccaacctaaatgtccaacaacgatagactggattaagaaaatgtggcacatatccaccatggaatactatgcagccataaaaaatgatgagttcacgtcctttgcaggggcatggatgaaactggaaaccatcattctcagcaaactgtcaaactattgcaaggacagaaaaccaaacaccgcatgttctcactcataggtgggaattgaacagtgagaacacatggacacaggaaggggaacatcacacaccggggactgttgtggggttgggggaggggggagggatagcattaggagatatacctaatgctaaatgacgagttaatgggtgcagcacaccaacatggcacatgtatacatatgtaacaaacgtgcacattgtgcacatgtaccctaaaacttaaagtataataataataaaattaaaaaaaaaaagaacctattgcgtgcagcttttcccctactctgtaatcagtgaaatcaaattgatagcttggaattggccatggtgggagtatttacatcataaaaattggccaacactacaaatcagggttttctcctagaaaagccagttgttaaacatttaccggccaggtgcggtggctcacacttgtaatcccagcactttggggggccgagttgggcagatcacctgaggtcgggagtttgagaccagcctgaccaacatggagaaaccctgtctatactaaaaatacaaaattagctgggcatggtggcgcatgcctgtagtcccagctactcgggaggctgaggcaggagaatcacttgaacccgggaggcagaggttctggtgagccgagatcgcaccattgcactccagcctgggcagcaagagcgaaactccatctcaaaaaaaaaaaaaattaccagcataccaccagactaatattaatgatataacaaatacttgtgtacccaccacctagcttctagctttgacatcttgacatattgctatatttgttttagaccttttattttaaagttaaaataatacaaaggcaattggtcctatctgtattaccctctacaatcccattcatttgctttctgttccagaaatacagtcctatcccaaacttggtgtttatcatgttttaaaaatatttttactacatatgtgtccataaataatacatggtattgttttgcatattcttagatttatatccatgatattataccatatgtatcattccacaacttttatttttaaatacattttacgtttttttgaaaggtttatacatgttgatatatgtaattctagttcattcattttaatttctatatggtgttccattgtataaatatattaacattaatttattttttttcattgatggacatgtaggctgtttccaatttttgtacacgtgttctggtacacatatgcagcagcttttaggatatatacttagaaatagaatttctaggtgaaaggatatgcatgtattaatctctgctagattttgccaaattgctccccaaaatgattgtacaaatttaccctcccaccaacagtagatgagagttcttgccagcaattgatattgtcagatggtttaatattttccaaatgatatctctttgtaaaatgatctctctttgtgggtttaatttgcatttccctggttactagtgagattgtatctttatttatgttcgttggtcatttatttttctcttttatgaattacctattcatttcttatgccactttccccctacagtgttttttatctttttgtaaatcaattctaaaaatatattctggttactaattctttatgattatataaagtgaagtttttttttctgccagtatattctttgtctttcaatattgtatgagatgtctttggctgtgtaaaacttttaaaatttaatctagtcacgtttatcaatcttttattgtatgatttgtgcttctgtgtctggtttaacagtccatcctgaggctatatctttctataatttattatagaaaatttatataatttactgtacaatttaaaggttttagtattgtctgttaggtcgttaatcaacctagattaacaatcaacttgtttttgtgtaatgtgtgaggtagggatctaatttattaatttttcatatatgcatccagttttcccagtacaatttaagaaacagtccctcttttcatctctcactttcaataatgttttgtagattttagtgtggttaacttggaatgtggttcattaggtttatttctaggtatttgatatttttgatgctattacagttttatgattttcttaaaattttattttcaatttgtttattgctgatatatagaaataaaattgatctttgtatattgatcctgtatccagtaacactgttacattgaactaaattgaactagtaatgctaatagtttatagatatttttggatcttctgcatatgcaatcatattaccagtgaataaagacaattttatttcttcactctcagttcttaagccttcaatttcttattctttcctgctcttttggctagaatactcagtatgtgctgaatagaagaagataatgcttggtgatagcaggcattctggtctagtttcctattttgtggggaaatgtttgtgtttcaccattaagaataatatttgtggccgggcgtggtggctcacacctgtaatcccagcactttaagaggccgaggctggcgaatcacgaggtcaggagttcgagaccagcctggccaacatggcgaaaccctgtctctaccaaaaatacgaaaaattagctgggcgtagtcgtgggctcctgtaatcctagctactcaggaggctgaggcaggagaatcgcttgaacccgggaggtggaggttgcagtgagccaagatcgtgtcactgcactccagcctgggtggcagagtgagactccatctcaaaaaataataataataatgtttgatctttatttcattttttttttaccaaattaaagattattccccactatttctacttaaaagcttttaaccatgaatgtccattgaattttgtcaaatgatattctatatctactgaggtgattatatgattgttctctctcttgttgaagtggaaaattacactacatgatcactgtatttctagaataaatatcaattagtcatgatgtaccatagcttttatttaccactgatttgattcgcaaaattatgtttgggctttttgcctgtaagttcatgaaaaagcctggtttgtaattcttcttttttgtacttttctggtttcaacatcagagctattctggccccatgaacaatactgggaagtgtttttaaaaatattatctggaatagtttgtggaaaatcagtgttgtttctttcttaaatataaagaagagttgactgtgaatttatctagatttgaggttttcttatgagaagttttaaatgatacattcaattttttgatagattttggactgttcagattttcaatttattcttttgttagcattgcaaaggtggattttttttgaggaatttgtccattgcaattcaggttgtcaaatttattggtttaaactctttacaacatcttattatcttttagacatctatagagtctgaagtgatgtctcttattatttcttatggtattgacaggtttctctgtccttttttcttaattgctcttgcctgaaatttgtcaagtttattaacattaacaagttgataaactaacttctggtattattactgttttgttttgaacacttttatttaatttctgctatctttattatttcctttcttctgctttcttgcatttgacttagtcttgttctagctttttgagatggaacaataaattattaatttttgtctttcttttttaacaatatatgcattttgaggatagggagatccctgtattctctgctttacctggatctcatgttttgatatgccatagcttcagtatcattaattaaaataattttaatttttcttcttgatttttgatgcagagattggagtatatggtttaatttctaagcaactggagatttcttggtaatccatttggtatttatttaattcctatttcttttgggctccccagcatttggtcacgtggcatataaatgttacacgtggatataaaaagaatgtatcattgttgggtgtgatgttctctatttgtcaatccagtgaaagttaactgtgttattctgatctttgtcattgctgagcttttattttattgctctaccagttattgtgaaggatgtgttaaattctttccacattactatgcatttgtctatgtctctcttaattcaatttttacattattgatatattttgcataatattttaagctatgttaccagatgcataccaatttaggattgtgacatactcatcttcctcttggatttactcttccatattttcagttatactttctgcctttaatgtctacttttatgttagaatggctgaaccagcttcctttttggttgatgtttgcatagcacatctttttacatttctgtattttgaatctttttatatagttatgtttaaagtatgtctcttataagcagcgtatacttttctttttaattgagcctaacaatctttgccttctatttgaaatatttcctttacatttaaataattactctgttaaattacatgaaactataaatgtttaaaacaaattacataattttataagtttcataaagttttacttttatagtttatatattaatgttatatgattttagagtgtaagttttacatagatatattacatttattcttaaatattttacatatttatgtaatattgtaaataaaatttcatttttaaaatttatgttctagttgttcagtgatagtgtgtaaaaatactattgatttttgctaaattcacttattacaaggacagcaaataaaaacagcttttcttctccctttccagtttgtatgccttttatttctttttcttgtcttatttcagtggctgtgatagctcagacaatgttaaattacaaagtggtaagagtggacattcttgtcttttttctaatcttagagaaaatgataactattccggcattacttttgttagttgtggatttttttacatgctctttgtaaatttgagaaagcttttttctatctacagtttgttggaagtttttatcacaagtggctgctaaatttgaaaataattttctgtatcagttgagacaatcatatgaagttttttcctttattctcataaaatcatgaattgcgttgtttaattttcagacattaagtcactttgcattcctgggttaaacctcacttggttatgatgtattatcttctcgtacattgctgcattcacttttataatattttgttcagaatcattgcaccaatgtccataatgaataatggcatgcattattctctttctgtatttttttcatctacttttgatatcagggtaatactggcctcataaaatgatgttctatttgtttcttctaaccttcattttctgaaagagtttatgtagaactggtattatttctttcttaaatgtatgatcgaattaatcagttttgcagtcttttcctggagttttctttgtgggaaggttttaaattacacatccaatttcttttctatatgtaagattatttagattttctatttttttcctaatgccaagtttggcaagttgagtctttagggtgtctgtaggatctgttgtgatatttccacttacgttctccatattggtaacttgtaccatctttcttttttccccacacagtttgacttcaagtttaccagctttcttaatcttttcaaagaatgagcttttggtttcattgattttctttggtgttcatctgttttgatttttttttctttttaaattgcattttattaatcattattgtccttcttattttatatttaatttgtcctcctttttgtagtattctaatgtgagagattagataattgagtttaaaccctctctaatataaacatttaaatctataaatttccctctaaccactattttaccaatatgccacatattgtaatacattgtacttaataacttcactgagttacaacagacatacaatatactgctgatttttaaggagcaccgtttgataagttttgacatatttatttacctgtgaaatcatcaccacagttaaggtaatgaacatattcatcatttccaaattttccctgtgctcctttttagtttttctcttgcttctttttagtttttctctcctatctttccaccccaactctccaactctaggcaatcacagatttcctttatgtcactatggactatataaatactgtctgtaaagtactcatatggtatgtactctttttattttctgacttctttcacatagcagaattattttgagattcgtccatatgttttatgtatcaacagtttctctcttttttttttttttttttttttttgctgaatagtatttcattatatagatataccacaattttttatcctttcatatgttgatggacatttgggttgttttcagttttgaggtataacaaatgaagctgccatgaacatttacatacaagtccatgtaggtacatatgctttgtttcttgggtaaatactgtgatggttaatttatgtatcaattttttactgggccacagtttgcctagacatttagccagacattattctgagtgtatctgagggtgtttctggatgatgttaacatttgtattggtagactgttagtccatttgtgttgctataaaggaatacttgaaactgggtaatttataaagaaaaaaggtttattttggcttaggattcggcaggctgtacaagaagcacagtgctagcatctacttcttgtgagggcctcaggaatctcacaatcatggcagaaggcgaaggggcagcaggtggttacatagtgggataggaagcaagagagaggtggaggtgccaggctcttttaagtaaccagatcgcatgtgaactcattactgtagggatggcacctgccattcacaagagatctgcccccatgacccaaacacctcccactaggtcccaccttcatattggagattacatttcaacatgagatttgggtaggacaaatatcctaaccataacaccctccattatgtgggttgacctcatccaacccattgaagatgagaatagaaccaaaaagaatgagtaagagggaactcctcttgcctgaatgcttgaggtgggccattggttttttactcgtgtttggactcagactgaaacatctgctctcttaggacctgaaataaaaccatacgttggctctcctgagtctccaccttcttgactgcagatttgggacttctcagcctccataaatatgtgagccaactccttataataaatctctttctatgtgtgtatgcgtgtataagtataaggttggaaatatattggtctgcttctgtggcaaaccctgactaattcaaatatccaggagtggaatgactgtatcatatggtaggtgtgtgtttaaatttctggaagtggttcaactcttttccaaagttgttgttccatttacgttcccaccaacagtgtattagagttccccttgctccatgtctttaccaacacttagtatgatcagttttgtttttaaagttcagtcattttcgtaagtgtgcagtggcatattattgtgatattaattgtatttccctaatgactaaggatgttgactatcttttcaagtgtccaaagaagatatagtaaatagcaaataagcacatgaaaaaatatatgaatgaacacgagtggtcattcaactcctagatatttgtattagtcaaattatacatatataaaataatgtgtattatgtatataatatgtctgttatatatacatatatataatatatattatatatatatagctctgaggtttggggagtatcctcaagttagaaagtcacaaactgcaatttctatcacttttaattgcatttttcaagatcaaattcatctctagtgtctttaaatagattttattttatctagtgtttatatttgttatctgtaggaggattcactcctctgtcatttaaaaaagtctgcattcattgagttcttaattttaaatattttattttcagttctagaatgtacctctgattcttttaaaaaataggctccattcttttttggtgaaattctttattttctaatctattttgttaaaaattgtagttattaaaagtccttgtctgctaattataataactttaccaactgtgattcttcttctagtgtctgttttttatttcatagcctcttgcatattcacatgtctagtacttttacattttatgttggaaatcgtaaatgatagaatgttagagtttcctaaattatcatctgccagaagataacacgatggcctttactctgttagatggggtggagtgctaatcacctcaatccaacaagcacttgtatttgcagttgtgaggctgcaggttcaatgaggtctagtctacctttgatctgccctgtttctggggcattggcatggccctctaatgtttttaactgaaagtctagcggatatttttatcctcagttttgccagcctcaggaagattctgttctgcccttcagaggttttcagtatagctctttagtcttatacccacacaacttcaattttaacgtgtgtcttaggggggaatctatccgtgtgcttgcgaccctttggtctccggttgcttacagctgttttgattgaatgtctacatctctgctgattcctcacttccccaacagttttcttctcctaggatccagtcctgagatctcagctgccagctattcctgaataagcagatgctcccggggaaagggcccttgctcctctgtgttcatggaggtgaccaaccatgctagtttgcctgggaccgagtgggttcttgacacacaggaccttctgctttaaaactgaaatagacccaggcaaaccaggctgaattgggcactctcatgtcgatgccccattcattttggtacttttctctctggttctcctgtttctagtttaccatcccccttttcatggagggtcttttctcttaagtatagcaagcccttgagatctgcaggttccacatttgcagactcaacaagccctggatacaaatacttagacaagaaaaacagtaaaaaataatacagcaattttaaaaacgcaaataaaagacaagacagccataactatttacatggtatttccgtcgtattaggtgttatacctaatctagagatgatttaaagtataccggaagatgtgtgtatgtagattaagtaagggactggagcttcctcagattttggtatccatgggcagcgggatgtgggtcctagagccaatgctccatggataccgagggaagactgtattgcgatcctgtgggaaatttcactctgcttttcagaagcttttggccttgctctttggcctcccaggaagtagtagtggaagtcattacaaaacacattgtgggtagagaaaaccggcctttcaaatttcaaattttatcaccatagtcccacaactgccaaaagctttgcttgtttctccagtgctacgcctcacatattggccaccaagagtgaataatttattaacatcacttccttttttcatatgataacattattttgaataataaccatgtaacaatcaggaataatcattattttggtcttacaataaatacttttaaaaatttaatcgttaattaagtttttccatttttaaagtactctttacattcaatattttccttgtgaactaaacttcgtacttactaaacaaaactattacttcttatagctaatgctctatttttattttgagacagagtctccctatgtctcccaagctggagtgcagtggcgtgatcttggctcattgcagcctccacctcccaggttcaagtgattcttctctcccagcctcccaagtagctgggattacaggtgtgtgccaccatgcccgactatttttgtgtttttagtagagacggggttttaccatgttggccaggagggtcttgagctcctgacttcaggagatccacccacctcagcctcccaaagtgctgggattacaggtgtgagccaccgcactcggcctatgctctatttttaaatttaacagttttaaaatttaacatagggaaaaactccaagtggcctcatatagaatgatggaatttaagtaactcaagttctttactaccgtggcttatttgaaatctattatttaagtgaaggaatatggagtagtgtagaggtgagagacacaaagttcaccccaaataagcacagatgactctaagtcattatgaacttaattttgaatgaatgtctttggtcaaatttgtatatagtcaaagctgactatacaattgagttttctgaattagcttccatgtaaaatacaatatttattaaaagataagtttaaaaatgtgctaatttgaagtttacatttatgactaaaccttaacactaagtacagcaattgtttagaacttataaaaaataattggtgggggggagtatttcatctctgaaattgtttagaattactaactcatggtgataacgaaaagcagattgatgtttagttttatttatttattttttttgagacggagtttttgctcttcttgcccaggctggagtgcaatggcgtgatctcagctcactgcaacctccacctcctgggttcaagagattctcctgcgtcagcctcccgagtagctgggattacaggcatgcaccaccacgcctggttaattttgtgtttttagtagagagaggtttctccttgttggtcaggctggtctcgaactcccaaccttaggtgatctgcccgcctcggcctcccagagtgctgggattacaggtgtgaggcaccgcgccggcctattgcttttatgttctctacagtctctgcatgcctctgttggctgccatcgggggcagaccactcccactgcccatccttggactccactgttttggtttccctgggcagttaccctctgtctgggcaagtgaagattctcagcctgagcccaatatcaacaatgttccaggctgaaacagcagtagccaattgtctgcccatttctgaacggttcttactattctggaactgtagtccttatactttttttctttgctttcacagttctggattcccttaaaaatactatttctgtgttaagtgttttctagctgtcagcacacatgctgtcttaccgtgacctattatatctttcttggaaacagaaggcactactggtttttgaatgctgatcttatattttggaatctcactgagtgttcttattagtcgtaaagccttatctataaattctcctggaaagttcccttcaatccttcttttaatgacaatttgaattataaatgaggattgaattttttcaaaattttttcagaatggatttagcgaattatgcgaatttctcatttaatgtgatgtattatacaataagtttttctgatatggaaccatccttgcatttcttagattcaccctatcctttcataatgtattttctaaaatattactgaacctgacttcctagttttccattttacactttcatgtctatttttctatagatttctttacttttgtattattcttagtggattttggtataaaggtcttattagcctcaaatgaatttgaattatgccccacctttctcattctttaatgcatagactattggatttacctgtacattaaaggtctgacataacaggtttataaaatgttaagctcccagggaatgaggtgcgatggtcaggagaggggataataatagattttgtacaatgtttaatggatattagacttttaagtctaacatttttttcttcttctgccaactttggtcatttttatttctttcaaatcattttatttaagtttcaaatgtattggtaagtatgctgcttgtagtattttttttttttttttgagacagggtcttgctttgtcgcccaggctggagtggtggcacgatctcggctcactgcaagctctgcctcccgggttcacaccattctcctgcctcagcctcctgagtagctgggactacaggtgcctgccaccatacctggctgatttttttgtatttttagtagagacggggtttcactgtgttagccaggatagtctcgatctcctgacctcatgatccgcccgcctcagcctcccaaagtgctgggattacaggcatgagccaccatgccctgtctgcttgtagtatttttgaaataatttgtaaaagctctcctgtttttgtagttaaaagacttatgctgtataactctcccttctcactccctttctccatttttttcttaatcagacttgctagaggctttatttatttaaaaagtatgttttgttttgtttgtctttgagacagggtctggctctgttgcccaggctggagtgcagtggcatgatcttggctcactgcaagctttgcttcacaggctgaagccaactgagtggctgggactacaggcacatgccacacccggctaactttgtattctttttgtagagatggggtttcactatgttgcccaggctggtcctgaactcctgagctcaagtgaccagcctgcctcggcctcccagagtgctgggattacaggtgtgagccaccgctcctgaccaaaagtattttttgtgcttgtggatattctccattgttccaatgtcttggggtcagagtgttggcaattgtcttgctggtagccagatttgaggatgacgagtttgcccaagggagacaatattatagtaaacagtaattgcgtggcatcattaagtccttaaggacaggaatggggcattattcatcctttgatcttcagtatccagcacatgtagagagctccatgatgctttgcaaattgatgaataggataggaccgacagagatgccagaattgcatacaaaccgtgtgacctttgcaatatccaccccctaatacctcattgccatctctgcagccagtaaactagattttagcagagatggaaagaccatttatttgggtcatacttcctcaaatgcaaaatggctccatccattgtgggttttggccctaaaatatagagctttccagagcagttctatttgttggacaggaaatggctctacacccttctcaatagatggataccaatcagtttcattccagccaagccaagccaactaaacccaacgaaatctacttaacccaattcaatccacatcaattcaactgaaataaaccgacataacccaacttagtacaacctcaccaccgacacaatacaaccccattcaacttgaccttattcagcaaaaaccattgaacccaacaaattccaacaaattacatttcaacatgatgcaacagaccacttctcagccacctaagtcaacccaatacaagccaatccaagtcagcacaactcccagcacaagatagtcccacaacccaatgaaattcaatctagcgcaatttaataaactgtttcaacaactcttttgtctaaggaaggtaaggtactttggacagaagaccaaaataatgtctcttaaatgtctatttgtttaccattcgtgtttaatggaactcttgaaattatagcctctccaaatctcctcagtgtgtgaggtaactgaaactcaggaattaaagccgcctcccctctctggcccctgaatcctcacactttattttatggagttactggtctcatctgaactagattgtgagtgcttgggggcagaaacggtgtcaaattcatctcccttcagtacctttagatgggcatcaagaaaatatagtttaaacgtataaatgactagaagtttgtgaagcttattcagttttggaggtcagtagcgttttatcccctttggggacctggctgaggaggattgtcaggagggcccacagacggacctaggtttgactcctggctttgccacctactatctgtgtgcccttgggcaagtcataccacctttctggggctcagtttccttgttcataaagtgagggatgtattactgactctagggctgttctggggataaatattgagttgacacatgtgaagcacttccaccatatctgacatataattgaggatgcataaatacctactatatttttttccctgagtttccttgttcagcattttcttttagtgacttggggacagcagcctctgtggaccagaaaatttcaaaactctctctggatcccttgtaggataataccctctcttgtgataatttcattggcataattgtcaaataaccaccatttgttttgtattttactatggttctttagctcaaataagcctgcaaatgattgatctggtggaagtatgaatttatacatataaataattagggtacaacacactgtgagaatcacaatcatttggacacccactgtttcccaggatgcgtgggtagagagctaaaagcaatgtgatccctgtccccaaggaatgtacagtttagtggagaacctgatgcagaaataagactggaaggggctaactttgactgaaggctccagctacggcagcctcgtatgctgagcagtgggttgccacgtaggaaggtagcttattctgggccaccactggtgagttttcaaccaggccttttctctctctgacactcagtttcttcaactgcaaagtggggatcgtggggcatagaagacatcctcgttggttgttgtgaagattcagtgagagagtgaccagttcttaaagcaattctctgtcttgagtcatgaagaatacatttgttggactccactttccattacgagaaatacacattccatcatctgaactactggacaagcgcttgcggctctcagacacacaaatggccccgtatgaacaatttggccaccaccatctctctcggtgccagattgcctgtggcaggagttgtggctgaccctaagtcctcagactggggctcacgtctaagccacatttgctgtactgggcatgccaggacagctggttccaaagtcaactgcattccctgccgaggagccagggctgaagtcttcatcacagcctggttatggcttaggcattataaatgatgctgtgctgacagccaggtggacagcctgcctaactggatgatgcttcatctgtcctgacagggacagccctgcaaatagaatctgagggatggcagacctattggagtcatcgtgtccttccactgagtctggtgggactctcttccactcatctcagactggaagatgcctgccttttttctttcttataagtctccacagagaaagggagctctccccaggacacactttatttttcttttggcagtggttagtgcagggttaaaaagttctggagtcagatctgtgttcaaatctggattgagccactcacaagctgtgtgaccttgggcaagttaccaaacctctctgagcctcagttcccttactgttaaaataaaaaagaagaatgatgaccagctccaagagttgatgtgggtttcagttggaagaaggatcacaggaaatgctctgggaatgggaggtgtgattttttggggggacactgggtcatcaaggacaattgctctgccccctcccttggcgtgcatgggaatggtgagagctgcccatcacttgggacaggtatagctctgtctggttccagggctagataagaccccctctgaagggccactggtgtcctctcccgggccctactcaggaggcagagtagcacaatgggaggacacaggactgaggatcagggcttgattcctggctgggtgaccttagtacatcaactgctttctgtaggccatagctgatggggaaagccctggatagagctttaaaaaatagccatgtttgtgtttgtggttctcaaactacccttcagggaacagaagtgcttcagatgtggctgtgctcacccccatgcccagccttcattaaaaatagatttgtggctgaacacagtggctcctgtctgtcatctcagcactttgggaggctgaagtaaaagggttgcttgaggccacaagttctagatcagcttgggcagtgtagtgagatcacatctctacaaaaataggttaaaaattaaccagggatggtggcgcatgtctgtagtctcagctactcaaaaggcaaaaacaagaagatcatttgggctcaggaatttgaggctgcaatgagctatggtcgtaccactgcactccagcctgggtgacagagcgagacctcatctctaaaaaattagaaagaaaaataaaaaatagatttgtgttccaagtaagaaaagcttaacaagctgctgttgccagcagactctaggtttacttggaggaggtggggattgtattctacctccagcaccatggccctcaaaggcacccaatggtaagtgtcctccgtggctccctgttgctttttgagagtcaggccttcactgggcactcaaggctttccaacctgacctgccccctccagctcactcccacactttggtgctccagttattcaactccaggccattctatgactgcttttgctgtggcccaacatttccttttgcgcactgcaattccctccactttgaaagctgttcatccgcttctccatggagtcccgttcttttttttttgactgtcctaaattgtttattaggtatgaattttacaaactttaattatattagcggtaacggtggagctggagagtattgcgccttctctaagctgcccggcgagaaccaccaacagtgtggtggaacttatggccctttccaagcccagggctctttcagccttcagatgtcagcccacgcatctccctgtgcttgtggagtggtttgatgatccattgggtgtcaggatttcttctgatagctttatggaatggatcaatgaggacaacctcagaaaatttttatgtggaatcttcaccaaccctgtaagaattcaggacgctcagagccccatggtggcgtccagctcgctcctctgcaacggactgaaggcttcgagcaaactttagctggttaacaccatgatggacaggcttgctgtaagttgcacccttaggaactgggcgttttcagccaccacggcgaacatgaatcctatatataacggcgaacacgaatcctatatataacgtaaccttgcttggccttgtttgtagcccagtcggtgcactttatcaggccgggtggggcggggagccctgtggagagcagatagctggcggtactgccagcagcggaccctcagaagaaagcgcatgacatcagactgcttctttctccatagctccaggatgtacttgtatgcacccatcttggcttatctgatggctgccgccagaccggagtctaattctttacttattcttctagaccacattgaaatgtcctctcacatcagaaggtttctattttgagccctccagggagaggtcagcaattattcatgcattccaatgccgcatttgtggaatgctttactatgtgccagatgtgggggataaagagtgaacaaaaagagacacagtctctaacttcatggagtttatatcctgttcaaaacagagagttaatcaaatacagacacaattgagtatgtatttagaaatctaaattagtgcccctaatgaaacaagttgtagcagaatgcttaacaagggatctgactaaattggtgtattggaagaggcttccctaaagaagggatgctgaagcttcaggtccaattagacaggtgagtgcggagtagggagggcagcatgtgcaaaggttctgtggcaggaatgatggtgtatggtgactgcccatcttggtctaccccaggtagtccctattgtcctggcttattgattaatagcattctcttcctttctccaaagtggcctggtttggaaggtaaattatatggttgactaactgaataaaaagaagctggctggccacagtgtctcacggctgtaatcccagcactttgagagacggaggtgggtggatcacaaggtcaggagtttgagaccagactgaccaacatggtgaaactccgtgtctactaaaaatacaaaaagtagctgggtttggtggttcatgcctgcaatcccagctactcaggaggctgaggcaggagaatcacttgaacttgggaggcagaggttgcagtgagccgagatcatgccattgcactccagcctgggtgacaaagtgagactccatgtcaaaaaaaaaaaagcctagagtgtcaggactgccatgctggagaggctggcagggactagaccacatagaaggctggagaaggagatcattatcttgcctaagaataatgagacaccattcaccattgaagggtttcagacagggtgtgccagggtattctctacttttcaaaacaacttcccccttctctattctcccaaagtgtttttggtgcctgctctcttgaggatccaccttgcatattatgggttgtcgtttccatagttcttctctccctagactgtgagctttgtgagggacagaaggaacctctcctggacaatgcttcgtgtccttctccttcctgcttgctgggtgttgggtgggaacaaatttatggaggctctcccatggcttcaaagctggagctacattgggtagtttatgtgaataataaattaacttctattatgtctgagccattataaatgactaggaaatattcaaagggaaaatactagctactgtgcattgagctcatggcctgtgttaggccttgcacactttatacacactatttcatttaatcatgaaaatatttacttcatggataaggaaacaaagattcacagaggtgacttgcgcaaggcgacacagtgaatgagctgggatttaaaccaagaatgtctgacttaaaagccaaagctgggccgatcatgcctgtaatcccagccctttaagaggccgaggcgggcggatcacgaagtcaagagatcaagaccatcctggccaacatggggaaaccccatctctactaaaaatacaaaaatcagctaggtgtggtggtacacgcctgtagtcccagctactcaggaggctgaggaaggagaatcacttgaacccgggaggcagaggttgcagtgagctgagatcatgccactgcactccagcctggcgacagagcgagacaccatctaaaaaaaaaaatatccaaagctcttaaaacagcaaccatgaaattagcagccctcaatttctccatttgtgggagcagagagaatctccccaccctgtggatccaaagatgaggttggccattgtcctgctaggtagagcttcaccagagcagatgctggggtaagggaggtgtgtgggagagacgggcatcccacacctgcagtcatagcctctgctcccatgtctacatcaagtacccagctcagacggggggcggtggtatttctttcaccagcctgcagtttggcaggttcctcaaagagaaatgctcttacgttcatttaaaagtctaagtagggacagcacaaattattagtgtttgaaatatttataaagtctcttgtttgcaatggcataggaggtgatagaccacaaataaaagaaaaccgcagatgcaccacgcatgtagagagacggagaggggcaggaatgttgtctgcctgccgccacctcatttttgaaggctgctaagccaggtgaattttcattctgtgttttctgaaactgacttcctttctacggctctgttcacctctccctccttaaaatgatcaccagacacttaaacggaagatttcaacatcacaaaccatgaacattagggcaagctgggggaaaggcagatgaaatcactctgtttttatttttgtttttttgagaaaaggtttcactcctgtcacccagactggagtgcaatggcatggtctcggctcactgcaacctctgtctcctgggctcaagcaattctcctgcctcagcctcccaagtagctgcaactacagttgcatgccactgtgcccggccagtttttgtatttttgtagagacagggtttcgctatgttgcccaggctggtcttgaacttggctcaagtgatctgccgacctcagcctcccaaagtgctgggattacaggcatgagccactgcaccgggccagaaacactactttaaaatttttctgggagtctaaaatgatatcaaaattaaaaagtttaaaaaacacacatacacacaacataaacttacacagcgtttaagttggggaaaaaaagcatggagaaaaataaatgtgcttttctgatttaatagatgtaaaaaccaaagtcacgcagtgagtcaaggatgaaaagtgaggtcgtccgtccgacttccagcccagacctccctttttgctgatctttggccacttaaatgcacatgctaataatttagaaaataggtgcttaggtcctgctttgggaattaccatggcttaaatgtattcattgatgtgcatatgtacatacatctgtttatacatgcatatgcattcattcactcatatcagtgaatgaatgaatgaatgaactcatttgcactcatttactaactcagcaagtactgtgctatgtgcaggagatgcagcagtgagcaagagagatttggccctgcctttcctgagctagtaaaagacgtggattcaggtaacgtcttgcgcttccagttgatcccacgaggagctctggagtgtgacttgtaccctagagttgtcctgccttggagtaaagaggctggccttttgtacccttgtattagtcaattattggctacatgacaccagtgtatccaactggtgcagaggggatggtgcaccctctccaggattttcaggtaaggcaactcctgtcagtggagggcagtgttagctgtggggtgctgctgtgttagcagcaaacattcaccacggcagggggctggacttaccaatgtacattaccagtttaatatacatttaatgtacaacaccagtttaatgcacatttaatgtaccatcaaggaggttggatgcattgacttttcaaaggggatctgagtggggcaccaatggcatctactacgtgagagacagagctttatcctactgggaaagtgggggaggcaatctagaattcacacttctatgtgatctcaatttgagggatgagggagctgggctatttacccaccaactcctggcagcccttactgaaggtgactcctggggaggttaattctcagtgtggcctgtgtgtagccacagagagctccagcagccgacagtcatgtgctggaaggtggagattgggcagatgtgcttggaaatggggagcattatggaaatgtgggtgtgtgggatgccaagatcatctgctccaggtggcctggaccaatcagacttatcccccagaaatgtggaatgaggaagctggtggaagcttggagtctcaggtcagctgaggaccagagcaaggaaatgacagctgtggctggagtggtcatcatggccttttgcgtggtgaaaatgtatgggcatgaaggtaaggcgtcatcagcattaatggccaggacagatggggagtagggagctgtgtgcatggagatgctggggagtcacttgggcaagggggtagttggctggggaccccacctggcttctgattattattttatttgttcattcattctacagatatttattgagactactgagatcatgatgtgccaagcattgtgctcaatgcggggaatatgaaggaggaataaaacagacagggtccttgctcccttggggtttatgttttatgtgtgtgtgggggtgggggtgggggcaggtaggaggggggataagtaaataaatgaacaagataatcagagagtcaggtacattcagtaaaggaaacccaacagggtgcaaggtggagagtatctgatgatgagggtactttcaacaggcgatcataggcaaattctgaccatctccactttacagatgaggaaaccgaggctttgagagggtaaggaacttgcccaagtgcattcagctaggaagcggcccttactgtagatctcttctgtctctctgtaataccttctactccttggctctgggttagttaattccttgagccaacagagattagagccactctttttgctttccctatcagtgattttatgatttggagagcaggacactgatcctcctgagtccctgcccagacccttctgggcacgcactggcctgggatgagctgtgactcacagctttggggccatcctcacattgcaactgtcagggtccaggagagtagagtggctctggggacagggaggctcgtcccggcccaccactcgttcactgtgggaccttgggcgaatgacctcacttctccaagtcccagtttcctcctctgtcacatgccagcaccagttgtctctacctcctggcactattgtgaagattaaacgagctaacacttgtgtaggagttggcgccgtgcccagcacagtaaacactcacatcaagctcagtttgggcagctgctgcccccaaatactctgatcacctgtcggagggtccgaaggggcaggggaaggcaggcactctcatccatgatctttaagaccctcagcccctgaatgaccctgaaccggagccgggggtggagaagaggcaattttccgactttgggtcaggactgccaaagccaattagggaagtcagacgggcggcagcctccagcacccaagcaaaccgatgtggcagccagcggaggggccagctcactctgaccttaaacccaaacgctcctgcccacatctgcagctaaataaaccaagtaaatcatgctggcagatagataattaaataattatcaggcacttaataacaaggagtgggtgttctgaattaccatattagacagtgtctttgaggactaattgttgcattacatcagagttactcattcattattcttgtcatttcgggtgataatttgcactttaggagacagcgacaattttagcaggcaattagagacgtgtcaggcctggccccgtgagttactgtcacaattattgcctttttttccagggtcctcatttgcagtcgtgtatttaaggggatttgggtaattccaggcctgggcaaaacaaccaacccacgggatagcggcagggtgaggacacagcagccgccaccattggagcaaggaaggggcggctttcccagaagtggtggtgcggagctcgggccagcaggcagagctgagcagggctgtcggagccacatccagtcactgaaaacgagagttctacctcccaagtagttcgtgatgctgtctgttcctctcttggcttcttgccacccactcaacctaggcttttgttactgcttacctgaacctttgcgatgagttcttcccaggccctggggaggcagaaaggaggagagaatgagaagggagaacagagaagaggagaggggaaggagtaaaagagaggaaggaaaaaagatgtagaaatcgtgtttttaactttctgtctttgatgatgcttgggaattgtggaggtcttgaggatccaaggagggagtgcccctcccagggttaggtaattcctagaggtagcaaaccacttctcttctgagcaagcctttgatatgcaaaccaaccaatcctgagtctttttttcaacctcctgccttccaggacgctatccccctgttccaaatcaccccaggaccaggaaccagacaactagggactgcccctatagcccagagtcagccgaaattattcaaaatggccaatgctaagtctgcctaccctggctcacctgttctttccagtaaaacccatgatattgttatcattagtattattactgtttttgagacaaggtctcactctgtctcccaggctggagtacagtggcacaatcttggctcactgaaacctgtgcctcccaggctcaaaagatcctcccacttcagcctcccaaatagctgggaggacagcgtgcaccaccgtgccaggctaattttttgtacttcttgtagaggctgggtttcaccatgttgcccaggctagtctcgaactcctgggctcaagagatctgcctgcctcggcctcccaaagtgctgggattataggtgtgagccaccatgcccagcctattattattattattattttattttggctaccattaactgagaaaacaaaatccatgataaaggccctggcctatgctttccctggctgcttctgccctgtgtaacgtgttacgccccctcctcttgggaactgtgagtaataaactatcttttcaatagcagtcgtcttcctgctgtgtgggtctcacctaaataaaaacaaaatcctgtgtgcaaaatagaaaagagtataggaaacaagagaagagaatagaagaaggaagagaaaaatgaaagaaaagaaagaagagagggagatggagagagaaataagagagaaaagggaacgggagaaaaaagtttgaaagaaggagagagaagactggagaaaatgaagagggagagagatgagaaaagggaaaaatcaatgtggaaaggaaggaaagggagagggagaagaaagagatgggggagaagtggaggaagaaggggaagactggagggaagtttgcatgtgaaagttatatatgaaaccaacatttttttttccattgcttggagtgtttacttttcagtgaaatccagtgtctgggttcatttacccacagctgactcacttgaccctgggcaacttcagaacagacaccacgaatcaatgactcagaataggctctcagaaaatatttttaactggctccacagtgtgaatcaagaaaaataaagcacgattaaatacaaacgtgaaactccacagaaagagaagagtttcagcttcaaagcaatgacttcttagctctgttcttagcaattagacaggaagagactgcagtggctgaactgggcctcctttttccttggcttagacttggaaggaattatcggttcagaatgcatgctgccaggagagagggcagctgctggaggaatgtgtggcccagtaacagtcagaggtagtaaaactccgtgcctcagaatgtaggcctggagtctcagctccactacttattagctgtgtgaccttgggcaagtcacatttctgaaatcataattttctcatctcaaggttgatgtgctagtgggctttgctgagctttataacaaaatcaagtctataaagaattatgggccaggcactgtggctcacacctgtaatactacactttgggaagccaaggtggggggatcgcttgaggccaggagtttgaaaccagcctgggcagcatagtgagactcccatctctacaaaaactagaaaaactagctgggtgtggtgacgagcacctgtagtgccagacacttgggaggctgagggggaagatctcttgagcccaggagttggaggctgcagtgagctctgactgaaccattgcactccaacctgggtggcagagtgagacctttactctccactaaaaaaatgcataggacctgatgcaaagaaagtgtttctgggtaagtgggagctactgttttattattattattttaaatttgatttagtgtatggttatctgtccctgtgtggctttgatctgaacccaccatctccctggtcctatcgggttagaaggtgattctggtgtttgggctggttccctctggcactggaactggcccttcctaagatggttcctctgagggttaggattttcccttgacctcactccttggggcatgctaccccaaacgtcgcaagtccactccctggctgggaagcagaaggaagggccatctacaacatgcactcagcatccactgcatgccaagcctcatgccaaccacataacattcatcactttattaagcctcacagtagcctctgaagtaggggcaagtaatccattcccattttacacatgagacaggcaaagagaggtagaataggttctttagggtgatacagccactcagtggcagagtcaagatttgagcctgactcaggatctttttgcagtcttccctgtctcctaagatgcaatatcattacctgatgtggtcaccccacaggtgaaaaactctaacagtgctttgaacccatttctgcagcaagagttggcttcatacgcaaaatgggtttttcccaaatgtgtaaaaaattatatttgaagaaaaccacaaacgattatgtaaaaagtaaaagtgactgtggacattgcattttaaggataagtataacatatataaatctatgtgtgtatatatatacacacacacacacatacatcctacacgcacgcacgcacacatatatgcataagctaaatggagttaattaagttaaaaccacagtaaatctgacagattcatattaacacgatggtcaaaactgtaggaaatatagtattttgaaaaagaataaatccagccaattacagatttatgttgacgccagcacagttaccaccgttttacaataatcattgatcaatcaacgttttatgacaaaactataattttcacgtgtttcaccctcacctaaaagtttcctcgtttgcttaattcccggaatgtgattccataaatctttctctttgcgatattaagtagataataagaatgccatgtaagatttgcttatggtttaaaccacagttgcaaatgatttataattagggccaaatctaagacaaaacattattaaagtcaaaacctgctgtaaattggtgcggttggcttgggcatttaggaatttatcggggtttgatgccagtatttcctctggtgatttccaaggggtctgctgacaccaaggggagatatttatgattaagggaaagctgcagaactaccggggtgtccctggtggcatcagccaaggggactgccaggcctgactccgtgtgtcatcatcaaaggcaaaaccctcagtgtgggtctctctaggcatgtcagccaacactgaggtgctcagagtccaccctgctcttcccacgggccgatctccttggagttttcagctgaagaagtttcttggaacaaatcagaccatgagagtgtcacttgtgcaacatgtgtttattgagcacctactatgtgcaaggtcttggggatacagtggttaactaatgaagcaaatatctctgctctcatagtgttgtggagaagagacttaatcctctacacataggaggtaaggcagaggccaatgtaggtgggaggccctggagagatgcgggtaatgggggagagggaagcaggtaggaagtgggagagaagctagactgttggagagtgggaagggaggctggtgggaggtgagggggaagttacagggatacaggggaggctggtaaggggtgggagggaggatgtagagtccatttaaaataaagttgtcaaggaaggccccctggaggaggaggtggttcctttgttttaggggtggaggagtgagccagggtctgtctagggaaagagcattggtagatctctttctgaggaggagagatcagtaaatgcagaggctgtgagaagacagcatcccagcacacataagtaacagggaagagcccagtgtgactgcagaagagtgagcgatggggagatcggggagtggagtcagggctcaggccatgcgctgccaagaccttggatttctggtgatggggaggccataggggagggttgaaccaggtggtgacctactcagatagacatttcaaaaataattgttttggatactgtttgcacaaatgactgtagggccaggagcaagatgggaggcattcctgctatccaggtgggaaaggaaggtggccaagaccaagaggtagagaggggagagatgagtgcacttgaagtcatttttggaatagagctgccaggacttgttgatgaattggacattggatgtgacaaggagggaggaataaaggttgggttgtttgagtgaaggttgagttgtttcaggcctgagcacctatttgcatgatggtgcctgttcctgaaatgaggactggaggtgataccaggttagagaaagagtggcatgggatctagattttggcgaggggttgtgaagcttgagatgccgttagtttccaaatggagaggtcaagggagcagatgaatatgtgagtctgacctcttttgggagagagatcaggctggagtgagaaaatatgaaggcatcagcctaaggatgggtttaagccatgaggtcaccaagaaccgaggacagataagtacaagggaacatctgcagctgagtcccgaagcctgcaagatttaggcattgggggaaaggagaagcacccgatagtggacatccagaaggagatttcactgacattggaggaaaccaagagcatgtggtgtccttggagagaacatcaacccacaaaggtgaagccatcagtggtatcaaatacggctgagaggtcaagtaagatgacaatggactctgactactggctttggaaacatgatggtcttcggccacgtggacatcaaaagttctgaattcttggactgcactttgacattttttcatcaacctccctgtaagacatttcaagaatcaatggtgtcaaaattgcttaatttcttggagacctgtttttgaagagcatcctctactgcatgacagctgccttggtatgatcacctaggaggtattgcttccaggggaataccaaggaaatctgcttcttttgaataactgactatattttccatctttaaacacgtagattcctattcccttctttgctttggccactagttgcttagcaactgcatccggacagcgtgttttgtgtgccaaactcattcttggttccatcctattttttattctcattttccctttgccctggttaccttctctattttattttaatcctcttgtaatgtgcacttttctctctaacgtgtgtatttctggtgtgtaatcactgtaaatttctctggaaccatatgggggtaaatagtgtgacaaatgccaaatgttatgactgttacgtagatatccctgagccttgattaagaacccgcatgcatcccgatggggagaaaagagacctgggcatggagccaggaggtatttactctagttctggctctgtccctaaatagctgggtgaccctggcaaatctagtcccctctctgaatctcagctacttccattatcacacacaggggttatagtagcttgggattagcaaacaagaggcgcccatgcactgaccatcacctggttccatagcagacatcactcatcaattaggcactctttggcattgggcttaaacaagacatcagaatccttcttaacaccgtacctcaggccatggctaccagttaatgggagttggcgtgctaaaggaggcctgtttgcactatgggactaagcaacatttccatgtgagattgattgttgctgatgaactagaaccccagtaccatctgtagtggctggtgttctattgtccacatgatagcatttcaaagcagaggggatggaaaggcattgtgggaaggctctataataactatataaaattataaagtatgccatgtatatcctagcatttgtcattggatgtatgaatatacccttaagtatatccatagagggtatggtcagaccataccctctgtttacttaagctgagcgtttaggacctcaggatatacaggctcactgaatgctaaatctcagagataatgatttgccttctattggaataagcaaaatcagtaatttccatgatcactaaaatgtgttgttttttttctttccaaatagaaataaagacataatccaacatttctgtttaaatcaccctttacatgtctgggaaaaaagaaaaaaaaacttttcttaatagagaaactgggaaactaacttttaattaattaattgatgttcaaaaaattccccgttgcctagtgtaattgagtgtatctatatgtctgtgttctttgagattcacagggccataactatgtgactcacacagtactaagacctccctaattaattccttcctataaccctttgaggtggctaattttattattcccattttagcactgagaaaattgaggctcagagagtgaccagatcaaagtgctttcaaaaactatcttcaaagatatctccgctataacaaaatcctcaccaaaaacttacaagaattctggctttctatcctcgtttttgaaacctcaatgagaaattgatggcttcaatagagattctgtgaacaggcttttatctcagaaagagggtgatattttctacattttcccatttctccatttaatcccccttcaacctgagagctaggcatggttgtgataccccttttacagatgagaataaaaaggctttgaaagtggtgccttgccaaagcttgtagatttgaacccgtgcgtgactccagatcctctcctccaggataaactgcctttcaggatgaactgtccttctcaggactaagcgcaggcgtatattacttctttgcagaaatgaaaatgaaggaacaagatgatgatggggatttccaaatgtaggtcctttattcagatgccaggttgctgggggaggagggaggagatttggccaccaggaaagacttggtgtcagacggctgtttgcatatggtgatcttggtttcttgtagccagtgacaagtgggttacctggttctgcgggcagaaatatattttgggattcactctggcccaggcactatggacaataaatatttcctgaataaatgatggttgaataagtgaacgaacaaatgaatgacagccctgcttgttagcaccccagcaaatgtcggacatctttgcatctttcaaaaacccatttacgacgccgagccatagacgccttgcctgctctgcccccagattccagaggcagccacccccctcccatctctgtttggggagccacatccaggagatttgctgcagcagcacgaaccggctgacaacacaattcttcctgtttccagggaaagcctttattttgctttgttctgcacttgaagggagcaggcacaaggctgccagaagagctcagctactttaggctgtgctgtttggaacgagggatgttaagcagaaaggcccaggctggtgggggactgggaggctgccttccagcccatccctgctgcttgaccttggatgcgtcattggtggtggaacataggttcaactatctttaaaatcaaggctgggccggcgcggtggctcacgcctggaatcctaggactttgggaggcggaggcgggcggatcacctgaggttgggagttcaagtccagcttggccaacatggtgaaaccctgcctctgcggaaaatacaaaaattagctgggcgtggtggtgcgtgcctgtagtcccagctattcgggaggtgaaagcaggagaaccacgtgaatcagggaggcagaggttgtagtaagccgagattgtctcactgggcaatagcacgagactctgtctcaaaaaaaaaaaaaaaaaatcaaaaaaatcaagggctggtgagattgcaccactgcattccagcctgggcaacagagtgacagcttgtctcaacaaagacaaaaaaaaaaaaaaaaaaatcaagggcctggcatggtgggtcattcctataatcccaacactttgagaggcccagacaacgaggatcgcttgaggccaggagtttgagaccagcctcagcaacatagtgacacctctgtctctaaaaatttttttaaagaaattagccaggcatggtggcacatgcctgtagtcccaactactctggaggccaaagcaggaggattacctgaagccaggaatttgataccagcctgggaaacaaagctctctacaaaaatattttaaaaatattaggtgggcatggtggcacgtgtgcacctgtagtactcaggaggctgaggctggaggattgtttgagcccaggaattcaaggctgcagtgaactgtgattataccactgcaccctagcctgggtgacagagcaagaccctgtctttaaaaaaaacaagcaggctggaagagatgctcctggagtcttttctaggtcaacaacataccttcatttaggtggtaggcacacagtgccttgcagggagcaggagctgaatacatccttgctgttctgatttcaaaaaacaccaatccctccctccctccctccctgctccctcccttccttccttccttcctctcgctctccttccttcctgtctttctctctttccttcatgtctttctcctctctctccctccctcctttctctccctccctccctccctctctttcttttcttctttctttcttttccttccttccttccttccttccttccttccttccttccttccttccttccttccttccttcctctctctctttccccccccctccctccctgcctccctttctttccttctttccttctttctttccttttccacctaggctggagtgcagtgggcgcgatctcggctcaccacaacctcctcctccccggttccagcaattctcctgccttagcctcctgtttgttttaataaagatagggttgcactttgttgcccaggctggtctgaactcctgacctcgggtgatctgcctccctcggcctcccaaagtgctgggattgcaggcatgagcccttagtccttcagcaagggccggcccttgctcctttcctgagcggctattttgagagcgatggaggggagagggtattagattcctgaccttgaggtcggggaggggagggtgatgctagtggtggacgaaagacttgaagataatgagaaattgcatcaactttacccaggctgtttctgggtctagaagcaagcaaaaataaggcgggagcgggtggggggaagaaaaagaggcatttattttggagccgtatcggaagcacaagtgtcatgggctgaaaggccgccttctcctgcgggctaagggtgtgggcgacagctcgcacattcaaataagggagcgattacacggcgcttgcttctgaagacggatttcctggtagggggagcgggcgggggggctgggccggtgtaaaggggacggcaacattaggctttggcaagttaattagggttcaggagtccagcgagcgagcagggggagaggctggatttgcataaatccatttacataatgttcttcacaaattgtgcagccagaaggcagggagggggtggggagggaaagggctggggagggggaggtggttagacgcccgaggcagccgccgccaaagggggaagggcgaggcccgagatgggacccgctcctccttcgccgcttcacctctcccctgctcttgtctgcaccagggccacccctgcctatctcggccgtcacctccattctgggccggaccccacactgtctctcatcatagggccggcccagagcagtcagatttctaaactgcctctatggtcacgggtctcccttgctttaaccctttccgggactcctggctgcactcagggtcaagtcccggctccctagccaacctatgtgactcctcgtggtggtcttgcccctttcaccctcctgacctggcttccttctagtcccctcttcctagctaagctcagtcccactgaaaagctcgtggccctggactcctttggctctcacaagcctcctccagtcctgacttgtcacctgtcctggaatgtccctaccacaaaagctagcttctttgtggcaacctcacctcctgctgcaccaaatactctgctcttggggcattttctgaagtccccataacttcctcaagtggactgctagcccccttttgtgcgaccagggaaccttcacccacctgtattccagaacttaccacgctgtctagtaactgcactggggagggtctctttccccactgggctgtgaccgctccagaaaggaacttgcctgatgcatctctgcatccagctggggcaggagtatgcaaacagtagatgcccaaaactgttgattgaatgaatgaaatatgtcatctcagccagagattgagaccaggtttcagtctgcctgaaatgagcctgaccagctctctaatttctctggggttctatccacaccttctttccttattgggttcctcagcctgtcctgtgttagtagctgcagaggatgaagaagctgtggtgacctctgagcccaattctccactgagggaagcaggctaaggcaagcaaaaggggaaagggcaacccaggctgggcacacagcatgtgcaaaggcctggtggccggaaagtgcatggaatgtttggaatgtggaagagggttgagtgggttaaagccagagatgaaagatggaaaatatggcgaggctcctattctgagcttaagaggctgaaaaagttctggtagatttttttgagcctctgaagctttgtgatcaaggagaagaaagaagaaagttgcaaccactgagcacctactgcgtgccactgaacaggtgatgtaattcaatggccaagcacagtagggattattctctccataattaccagtgtggaggatgacgagcctgctggagtcacttgcctgaaacctcacagctgcaaaatggtcaagcagggctttggacccctggtttccaaatcccacgctgccttctgaattcaatgtatttatgttttagaaaagcatataaaatggaagggaaatagaagggagaaagaggcaaagagaaagacagttggggggaggcaagcagtcatttagaaagagaaagagaaaaagggagatagagaagagaggagaaagacgggggaagaaagggagagaaaagaggagagggaagaaagataaagagaggagagaggagagggaaagcgagaagagaaaggaagaacagaggagagaagagggaaagaagagaaaagaaaaagaaaggagaagaaagaaaaagaaaagatcatgtcctttgcaggaacatggatggagctggaggccattatccttagcaaaataacacgggaatggaaaactgaatactgcatattctcatttataagtgggagctaaatgacaaggatacatggacacatagaggggaacaacacgcactggaacttatcggagggttgaggatgggaggagggagtggatcaggaaaaataactaatgggtagtgggcttcatacctgggtgataaaataatctgtaccacaaatccctatgacacaggtatacctatatggtaaaactgcacatgtacccctgaacttagagtaaaacttaaaaaaaaaaaagagagacaagaggggaaggcaaaacagagagagaagagaggggagggaagaaagaggagaaagagacgagagcgagaaagtgagagaggggaggggagagaaagaagagaagggagaaagaagggagagggaaggagagagaaaagaggagtgagggaaagagagaagaggagagagaggaagagaggaggaagtggaggagagaaggctgggaggaaggagaggagactcaggtgtcagtcaccctgcacggcggcagggatgctcctgctcctagacagagctgtccaatagaactctctgtgatctctaatctgccctccaactcaagtgctcagtagcctcaggtagctactgagcacttgaaaagtggttagtgcaactgagaagctgaatttttattgtatttagatttatatttaaatgctcacataaaggtagcagctacagtattggacggtgcagctttaagaggagtccttcttttttccatcaaggtcctggcttgaattttctctgggtcctttttggcctccccttctgggactctgttctgaaccatgcatccctgatgtttccttccctcatattcctggacatcctacccacactgaggtttaattttagctgattctctctcaaggacaaagtatatatttttattttaatttatgtcgcctgaaccatttccaagttttacttttagaacctgtcaatattagtgacatgtggcattttaggtacttttctgctggtggggcctaaatttattgtcattttatgtcactcggcaaaatgcacaaaatgccagaagtgttataaacagagacgatttatgttcgggttggggtgaggttaagagaatgaatataatcaatttttttttcagagacttttatgcgagtgtgagggccagcaggtgcacatttgaagctcagtgggaagtgttttccaagcaacaggagacagcagatgcagatggggtccaattactgctgctcacggctgatcacgccatgcacttgtgtgcggatacctggctcctggtctcaggcacctagtatggggctatgcacacggtaggtgctcagttaaagcttatggaagaagggatggagaaagggcaagagacgtaagtgggaattctaaagactcttctgttcaacccccgtcagagtgatatttcttgaccttgtcacttaactgctcaaaacctttcaatggctccctagtacccctatgttctgacttacagggtccttcaagatctgcacctgagggtgtctctaagggacttggaatgctctgaaagtttcatatctctgctccttgccttcccatgagctcctcctgttcttgggagtgctcactcctctttcttgacccttcttcagtaaccaactcaaactcaaactcaaactcctctgtccttgcaccctttaccttttatccctccagtgagagtttggtgtttattgttggtaccttatatatagtcatccctgggtacccatgaaggattggttccaggaccccctgtggataccaaaatccacgaatcctcaagtcactgatacaaaatgacatagtatttgcatataacctacacaatccacctgtatgctttaaatcatttccagattacttaacaatacctaatacaatgtaaatgctatgtaaatacttgttatactctattgtttagggaataatgacaagaaaagaagtctgtacatgttcagcacaaccattctttttttttttgagacagtgtctgtctctgtcactcaggctggggttcagtggctccactatagctcactacatcctccacctcctgggctcaagaggttctcccactcagcctcctgagttgctagaactgtaggcatgcaccaccacacccagcctattttttgatttttttggagaggcaggatcttgctttgttgcctaggctgatctcaaattcctgagctcaagcaattctcctgcctcggcctcccaaagtgctgggattataggtgtgaaccactgcgcctggctgaaaatacttattatgttacatcttcttatgttacattgagtgggtaagtgagtgagaatccttaaatataacagagaaacagaaaactaggggcctgtagattgtgttgctttacaagattcaggtgaattgctttttgactcttccaataagctctcaagtatatttaacattttttttttttttttttttttaacagaagtggtgtctcactatgttaggccaggctggtctccaactcctggcctcaagtgatcctccccctccagcctcccaaagtgctgggattacaggcatgatatactgcgcctggcctgcaaccgtccttttttccccctgattattttcgatgtgttgttggttgaatccacaaatgcagaatccaagaatatggagggccaactgtatgtctgccttagagggctccacaggttgcctcatttgcttccctgttgccaccagaagatcatgcaccactgggcggcatggtctggagagtcccattcatcttcatcggggcctgaacagagaaactgacaaattaaagataattgaatgacataatgaatgggtgcaaattgggttggtccctcaccatctccacttcttagccatgttggatctgccaagtcaattaccaccattgccttctcacttccccatttccaaacctcatgactgttaccttttcctccgttctccttgtccttatgagtttatgcctttaaaacaaatcctgtattataatagtattgtcttttagggaaggaaatatattagaggagtgtgttcaatctaccatctttcctggaagtcagtaacaaatgaaaggaaatttacctgatagattgtgggcaagtcacttctctccgtacggtctctaattcttcacctgtggcatgaggaagttgggctggatgagttctagggtccagccaaagtctgcgagggggtcagcgctggattagagatgtctggtggaccgtgggcatggattttacataacagcagtcactctctgggatccctactctggccagtgctccccttggactgctaattctctttccacacattcaggttctgactcccaaactctgaggacgatggcaggttctgaggtccctcccatcttgtacaactcacagtgacagtaactgtctcagcctgttcgggctgcttataacaaaggagcatggactgggtggctcataaacaacaggaatttatttgaggcatgctaccccaaacatcacaagtccactccctgtctgggaagcagaaggctgaaagtcctacatcagggccagcagaattgattctgatgggggttttcttccaggtcgcagactatcgacttcttgctgtatcctcacatggtggaaagggtgctggggagccccatgcggtttctttaatgagggcactaattctgttcatgagggctccaccctcatgacctaatcacccccacaggtccagcctcctaacagcatcgtgctgggggtaaggatttcaatatatgatttttgggagaacacgttcagtccgtagcagtgactgacacttgtccagttcagtggcttactcagagacctcaccttgacctaatgcttgtgccaacctggtgagaaatctggaatcccattccacagattagaaatctgaggtttagagaggggaggggactcacctaaggccacggagcaagtcagtaaggacccaagctggcagtcgtggtctaactgacctacattcctggagcgtccagcatcctgcccatggtggctgctcagctgatatttgtttggaatgaaaggtgaccacacttgagttggggtagtcaggatcatggcgacagccgtgagggcaagaaacagcattttaaaaattatttacttagtgtgagattttcagagctattccatgccacaacgtggatcggtacttcttcattctttatggctgaatgatattccattgtataccacatgttgcttatccatctgctaatgggcatttgagttgtttttaccttttggctattgtgaacaatgctgctctgaacattcatgtgcaggtgcatgtctgactctaggtgaaagaagctcaacacaaaaggtcacaactatatacagttctatttgtatgaaatatctagaataggtaaatccatagagacagaaagtagattagtggttgctggagctgggagaaagagtgaaaagggaatggcagccaggcgcagtggctcacgcctgtaatcccagcactttgggaggccgaggcaggcggatcacaaggtcaggagatcaggatcatcctggccaacatggtgaaaccccatctctactgaaaaatacaaaaattagctgggcgtggttgtgtgtgcctgtagtcccagctactcaggaggctgaggcaggagaattgcttgaacccaggaggcggagcttgcagtgagccaagatcgcgccactgcactccagcctggcaacagagtgagactctgtctcaaaaaaaaaaaaaaagggaaaggctactgacggtatgaggtgttctttggaggtaatgacaatgttttggagctagacagagctatggttgcacaacaccgtgaatgaactaatgctattgaattggataccttaaagttgttaattttatgtaatgtgaatttcacctcaatcaaacaatgaatgactaaagacttctctccagtaacattcaacaaagccttctgtgtgtctagtaagtgtttggttctccagtttaaaacacatagcacacacttgggaaacatttgtgatatcagttcaccaacgggcaagttgatgtttctgtcttcagccttgatactcccagtcaagttcccagaccagtggctcagcatccccaggagctggttggaaatacagaattgttggcaaccccaaacctagacctactgaatctctgccgtatggcatgcgtttgcctctgcaacccactttcctgctgtccttgtctaatcactgaagagagaaactgtaagagagggattgaggctaaatgtccctgaagttcgtcctcgatgaatagatgtgcggctcaccttctccctctctctctgtctgtctttttttccccctctttctctcttttctcccaggtcactctctttctgtccctcccaccctctcctctctctcatacctcccccattcagtagagtcccttctctcctgcattctctgaattgatttttctcactcatcttggcaggttagtaatcaccattctcagcagaaattccttccgtttcgttacaccgggtgagaaatcctgggcagcagggggtggggtaggggctgtgtttcatttcactcccatctctgtgtcaggtggggagggaggaatctccacactgagtatcccacaggaggaaggccagtgctgggaagggatggagaccccttggtggctcttttcagcttcaaggtcctgtgctgcggctcatctcagctcccagggcccctgcctttctctatcctcaacaatcgctcacatttgaggggcttccatggctggcagaacctatttctatgcattgctcagtttaatcttcacaacatttctgagacattggcattgtcacctccttcatgttacaggagaagaaagtgaggctcagagatacttgcaggacacctgggaatgagagccagtctccaggctcgggcaaggttgtcctggactataccagagtcatgtaataaaaggatcatgctgcccatccacctgccagccatggtgggttctagcagagagagcccaacatttgtgatcctatggacttggggtccattcccagctctgccacttactggccatgccactctgggaaaattgccccatccttctggcccttcctctccttagctgttcacacgggatgggggggatgggacagacctgccagagtacaacacctaagaacaaggaattctgtaatgcaaaccagctgtggaacccaggggaggatccaccatctcttggaggtaccatttccctattctcaaagcatatttagaaaaaacacctactttctgtgttgttgcaagaattgcgtgaactattacagctctcatgcagcttttagcgcatgcctggaacacgaacaagcactggataaataaataccctggatggaaataataatattgtagttcaaggatttaacatgctctcacaatggcagatggaccctgaattcagagatgcagaatatgaacgaaacgtgtgcttagaattaagaacatcatcctgtatatggtgcctgccccatgtgaggcacaaggtgaaacattttacagacgttttcctactgaatcccgatgaagagtcctacagggagggtgtagtctccccattacataggcgagaaaactgaggatcaaggagatgaagttacttctaactcctatagtgtgtaagaggtaaagctggaatcgactgagatgagtctgctaccaaatccaaagtacagatgaaaaaaacaaaaaatcagatgtgaataagttttgcaaactacatcgttctagtcatgtgtagggtgaaagatggaggaaaacatcatcatcatcatcacactgtcatatctattaaacattagatatcatcatcatatctactaagcgttaactgcttatcacgtgccaaacactgagctaagggatttatatggattacctcattcaagctctgcatagcaactctgttataatcctcatttcacagataagcagacaggctcagagtggtaaagcaatttatcctaggtcacacagccaggaagtggtaaagctggattctgacttcagggcttacaggctccagagtggagtccttaacccttcgcctgaaattggaagctactaatgttggctgcagggagtttaactggcaggaccctctcagcccttggggacctccctatcaccccgtgccccgatctgggctccaaactgggagtggactaggctcctacccacgtctctgtgatcagcccatcttcagatcaggctgtccctctcctagcccgtcgttggagccccagccgggaccatgctgtatgcagatcaccccattaaaatttcatgtggattcaaaaattcagtgttgactccggtgacgcaaataagtatgaaaattccgaggaaggcacactgttactgaaatcaaatggttgaacggccactaatgaggcagacaaggagcctcgctcaccctctgaggattgaggagagacgagaggagcaatcgcgctacattattcatgccctctcgtttgagtttcagatctcaaggaggctctggaaggggaaggcagagagggcagaggcggcgggaggcgggggtggcagcctagacagggccccactctgccagctgtggaaggccgggtgactaattgacaactactcaatgatccccttccctagggcgcccctcttccatctctcatttttagctccggcccacaagcacctcccttgcacctgccacggtgcccagatttcccccagcagtggatgtgtgagtgtgagatgcagaggaagacatggcgtctgggcggtcctggctctgtgtgatctcgggcaagcgactaaacctccctgaaccttgattttttgttccccttgtaaaatgggaaagcagaaggagcggctcctctacctactctggggagaggtagcatttctgagagtcaaatgccgcatcgccatgcttctcaagtttgaacgctcaggtgaatcccggaggaacttgttgggatactggtgctgattcagtaaggctggggcagggcctgagattctgcattccaaccagctcccaggtgaggcccatgttgctggcttgcagcccaccctgtgagcagcggggccatacagataggaaagcactttatagcgaccactcgctggtctaagcctctctgtgcatcagcattactggggagtttgtaaaaacacgatgcccttccccatccccccagggtttgctttaattggttaggtcaaggcacttgtacttcttaattctgcccccgacaccacccaccatggcccctatatgcagccagatttttgtagttcttgttactaatatgtctttattgtttatgcccctcgtagtttcttttttcttttttctttttcaagacggggctcactctgttgcccaggctggagtgcagtggtgcactcaagtgattctcccacctcagcctccccagtaactgggaccacaggcacatgccaccatgcgtggctaattaaaaaaagaatgtagagacgagatcttgctgtgttgcccaggccaatcttgaactcctgagttcaagtgatctgcccaccttgggctcccaaagtgctgggattacaggcgtgagccaccgtgcctggcccccctcatattttatgaccattttgcaagcttcgttttcttcaactcctcttaaacgtcagtgctgcaatgctttctctcttttccccgagcaaacccgttgtcaagaaagaggctgaagaaccaattgctccgactcggaggaggaaggaatgcttcacccctgggaactgacctgtttccaggggatgtcacctccctccaggttctaatggtgcacttcaggtcccgctctctgaatagtgcacctggggcaagtttgcaccaggggtcacctgggcagctgtcccctttctctttttaagattgaggcctgaccacgctgataacacattctctagaagtagaaaccaggtttcagacaagccacggaggtaaaaccagctagagagggaaggaattgatttccgccagagaaacctgcacagaatgtacaatcccatcgttgtccatgcacccagcataaccaataaacaggttccccagtcctccctgcatttcctaattattactcagctataaaaatcccttctccctcctgccaacattatcttagtaaacgttatgagcgctcacgaggttaatgcagggccgtaaatccgcagtgggtcgaacaagtgagacttgaggaactgttcataaatctatgggaacggctccagtttgtttatttaataaaatatcatttcgtagaaatgcacagggcactgtggggtttacactcagtgggcacgcatggagaggggtgggtggtggaggtgtgccgagggtgggggtgtgtgtgcacgggcgtgcgggcagacttccacgtggcctctgcccggaatcgcagggcgccatgccgtttattactgcaccaggcattctgaactcagtacccgctccacttaaggcagcctgttctctcagaattctttaatgggcctcgtcaatatttgaaatggtgctacaaagcccaggacacgtgtaatgctgtttgcactacatgaacacctcctcgagacaatcttctgggatttgttaggggcgctttacccacattgggctgttaaatcaacaagaagtcaggcttccccacatggcatggaatgaaatgctaaaagcatgggcattggagtaaacggacatggcttctaacaccagttttgccacctgctgggaagatggccttggcattcacctctctggccttggttcccttctctgtaccatggggatgattatctgtactttatggaatacagatgtgatatgcagagagactagaatggagcagtaagtttgctttttttttctttttttctttttttgagatggagtctcactctgtcacccaggctggagtgcagtggcaagatcttggttcactgcaacatctgcctcctgggttcaaacaattctcctgcctcagcctcctgagtagctggaactacaggtgcaccaccatgcctggctaatttttgtatttttagtagagatggggtttcaccatgttggccagactggtcttgaacacctgacctcaggtgatctgcccacctcgacctcccaaagtgctgggattataggcatgagccaccgcacccagcctcctttcatttctctctcatttacctgtgagttttcagcattgcagtatgctgagatgactttgttaattagttttggccgaaggtcatctacagagcccccattcttttctttgtaattgtctgggccccgaactcaaaggcagtggaatgggatcaatggaaacgggagattctgcagaactgggatgtggcattcctgcccataggggtttagcatccctgagtcaccccatcatagactgctgtgaatcatgttactgaaggaaataggcagtgtgatctagtggtaaggaccatggagttggcagccctgggtttgagttctaactcaaacacttaattatctgagtagcctctgtggccaagtaattgaagccctgggttcttgggaattggagatcttaatacccaccttctagggctctgagcatttcctgagctaatatgggtaaagtgtgtgcgtagacatggcacatcatataaacacaataaaccaaggacagatggagagtggaagaggaaaacaagagagaggcagaagcaagggtgactaacctgtcccacttttcttagatctgctccattcttaaaacaggaaagtcctacatcctgggaactcccttagtcctggaaaaactggatggtagattgcccttgcaggaatggacaagtcaatgcttgaagcactcttaactctgggtttaatttggctacagctattgatgatttaataacagctggctgattatggaggcttcatctagaagactctaattccccaaggctaattgttgagcgtttgattaacccagtggctctcattagaatcacctgaagagctttctaaacataccaatgactgagcctcacccctaactagggtttctctgccttgacactattgacgtatcgggctggataatttttgttggggcaggtagtggggagtggaactgttgtgtgcattgtagatgttgaatagcacccttggattctatcctgaagatgccaggagccatgtcccagtcacatgacaaccaaaaatgtctccagacattgctcaatgtcccctgcagggcaaaaatcacccccaatggagaacaactgccccaggctaatttaagaatctgggggcagaatagaaattaagctttggtgtttcacattaagttccctgcccccagatgactatatatagcatttggctaagaccaacctcactgccaatgtggatggtgctgacatccaaggagaactttagaaggggctggagctgacttggggttgggtccagaatgactatacagaagaggctgtgggcaaagacctcacatgataagagaggtgctgaattcctactctctttatttatgtatttatgtatttatgtatttatttttgagatggagtctcgctctgtcgccaggctggagtgcagtggtgcaatctcggctcactgcaaccctctgcctcccggtttcaagtgattctcctgcctcagtctcccaagtagctgggacttcaggtgcgtgccaccacacccagctgattttattttttcagtagagacgaggcttcaccatattggccaggatggttttgatctcttgaccttgtgatccaccctcctcggcctcccaaagtgctggaattacaggtgtaagccaccgcacctggccctactcttaaatattccctttcccccaccttggtatacagtccaaacctcaccattagatatgagttcttgcagaaagttcagagtgccgtgttttgagttgtcctcttttaagttcttctggaaggcagatcatgacattgcttttggtccctgatgacctcttcaaggcggagacagtgctgggtctcaagatgttttgacatgctaaatcatttgctcctcacagctctcctaggtgaggtggatttctttgcacgttttatggaaaaatgatgttcagagagttttaaacaattttctgaagctcacacagctgttggcagcacagattaaagcaaaactcaggacaatcactaacttctagtgactggcccactctgacatgtctcctcctatcccttagacagccaagtgctggctgagcacagtggggatgggagtgggacatgaatgccctggccaagaaggaaacattcatggctgctttctttatgccaagtcttgcacttatattatctcctcgaatagtcccaatgtcccggggcagcaatgcctatgattcccccttttggggaggagaatgctgaggcctagagaaaggaagcaatttgcctaaagtcatgcatccattatcaaggggaggtgccctgatctcaaaatcggggtgggggaagagcattataaatggattaatattttaaatttctcagctgttaaatgagaggcactccttttttttttttttttttttttttgcagcattccagtgctcagaattatttaacagctctgaatggaagcatccaccagttgcatgtgtctctttggcattcctatgactgaaaacattagacattttctatgttgattgatcagagctatcatcatccctctgctaacaaagtcctcctttaattgggaggtttcagcccagcttggctctgattggctcacaccttacaggaagcatctaaagatcttagaggcgagacaggaagtgactctgtgtgaggtcagcatttctcctcttttctccaaggccaccataatccttatggagtgaagggtagtcacaatgccattttgaaaagtgattacgaggatcataatagtacgaatggtgaatgagttttctgactgccaggagaggaagcattttaggattgatttcagaagagaaatccatcattttgattttaactgtggcagttaacacaatgttcactctaattttagaaacattttgagacaggaataggttgtactagtctttgtcaggctgtagataacttacattttctgagtctaaagtggatactagctaaaagattacgtttaaagaaagttctcttttttagaatcaccccagaaatttctagtgtaacgacagcatttcttaacccgagtggaactgtgtgtgtgtgttaaaatatctgtgttaataaccagcaacctcggaagtgagagggaagggaaaaatggggctagaaggagccaaatcccacttgcatggcagaggagacctggaagagaagatggagttaatcagtctgaaataatgggtgatgagaattctgccattgaaccaccaatgctccctagtgtgaaataatgggaaagtcatggagactggaacagcacatgaaaagccacagagcataaaatacccagctgtactgggggtctgggaaaatttccaagtggtgggagcaagaagtatatggcatggggaggtcaagagatgtgattagttggggaaggttagggcacacttatcctacagtttgctttttccctgacacccaacagaggcaggctttaacccccaagccaccctgtctccaaggactggcttggatgcctgtcttcctgagctccatcttcactgactccatggaggacagaaaactcattaccatcagaggctcaccctagatgccctgtgtggacctgtgactatgttaggttttgtggcaaaggagtattaagattgcaggtgaaattaagtctgcagagcagttgaccttaaaatgggggagattatcctggattatatggataagcccagtggaaccacaagcgtcctcaaaagtggaagagggaggcagaagagagagagaactatggagatggcagcttgaggaggacagcttaagaatgctggctttgaagatggagaagggggccaagagctaaggaatgagggcagcctctagaagctggaaaaggcaagggaactgattttcccctgttctccagaggaagaacagccttgctgacaccttcactccagcccagtgagacccatttcagacctctgaccctcagaactgtaatataataagctcctaatatttttaagtcacttaatatatgctaatttgtttaagcagcaatagaaaaggcccttagttctttaatctcataaatgggtttaataaccatttcattttgtagtgtattgaaaattgagttaatgtactacaccgagtgtttagcacagcccctggacaatggtaccttttttattgatgccacaggtggaatgaccagtggtcctcctggcttagtcctctggctgctttaatgtgggactagaagaaagagacctaaattaggaatctgacagacctgggttcaagtcccggctctgcctctttctaatggccttggacttgttcctaccctggaagaagttttccagtctgtcttatgggtgtgggagggatgatctatcacatctaccagcagtgagcctcctgtgaagattcagagtgggtgggcttttgtagcccactcaaggccctcagagaagttttctgtaaatgtggtaccttgcaccaactccttgggaagagattttctcaggcttcagaactgagggtattcacccctgacccacttgcttctttctccagggaacgctcatggattcctgagaagttggctggaactaagggagcattcagagaccacagatccagttgactggtccctgctgacatccagtccacgttgttggccacatcagctcctcttcaaactcatgatgcaaatcaacagctaaacatgttgatattttttgtttctctcagctaagtggatccctgagtcctcctggtgcagtggaaagatttgagttttgcagccaaatagagtgaggtttaaatggtggctaagcggctcacgcctataatcccagcactttgggaggcataggcgggtggatcatctgaggtcaggagttctagagcagcctggacaacatggtgaaatcccgtctctactaaaaatacaaaaattagccggacgtggtaatcccagctacctgggaggctgagacaggagtattgcttgaacccgggaggcagaggttgcagtgagccaagatcgtgccactgcaccccagcctgggtgacagagtgagattccatctcaataaataagtaaataaataaatacataaatggtggctaagccacttgcttgtgagcaaaatggttagcctgcatgagccttggtttatccacctgataaatgaagatactaacagtcaacattagataaccatagagcctaactcataaggccattacgagaattgagatgttagttcaagtaaaatggtgctatcatttggatgattgtctactccaagactcatgttgacatttagtccccagtgttggagggtgggcctcatgagaagtgtttgggtcacggggaagatccctcatgaataggtcaataccttccctcgggagtgagtgagttcttactctactagctcctgcaagggctgcttgttgaaaaaagccgggtatctccctctgcctcttttgttttctgtctccatgtggtctgtatacacaccagcttcccttcgccttccaccatgagtggaagcagcctgaggcgctcatcacatgcccaatcttgaacttctcagctctcagaattgtgttccaaataactcttttctttataaagtacccagcctttataacaacacaagatggactaagatacttgttatgatgcaggaggaatgaagaagtgtgggaagtattacctcgctagtaggcgaaggagggcataataattacagaaaaattcccataggaggttatacttgagctgaacttcaatgggtgaaatggatgtaaacagtttagcacaattcctgatgtgaattgtgtgctcagaaattaaaagagagagaggaagaaattgggttctctgaggttagtgggggactaggatccctccttgccccctactgaacctgatccaccccagtcctcacccttcttctcttcctgcttattcctcatgcctcatcgctgcattcactcttggtcctggcccctcaccctgcattctactgctggggcagccagcagagacagacatgacaggagacagggaaagtcagaactgggaagagggcttgaagaagattgatactggcattgttgtcatggcaacaccaggatgagctagaggccccactgctgggatcagcttctgtagttcttctcagattcgagagcctttgagggtaggcaagaagctcagataggggccctgagaaaaacaggtggggcctcagggtgacagccagtgagagggcaggcactgggacctgggatgcccttctgacaacatctgctgaatgcatgggaccttagagaagacgtgtccaaacccctcaattgagtcatggggaactgagcactaaggaggagagtggagagaacacatttcctgagtacctactatgtacctggcacttactgctagcttttaataacatgtctcttcaccagactatgtgatctgccagagcaggggggcatcttgggtgaggctagatgtagagacacctgagtccaaatgctagctctgccacttatcctcaggatggcagtgcacgtgatctcccctctctgggcctcagtttcttcatctgcagaatgagtaaagttgatgttatatattaccttcctcacagagtggttgagattttgaatgatgtaatttatgtagcatgcttagtgcatgcttggcaaagcataaatgtcatatataataattaatattacaagcctacccagagaaagagaaatttgcatcttgatggctaaataaaatagactgtgtttgtatagctttgggagaagagggatctagtttacttcttgaaccatctgttttcatcccctttcctgccttacatttttatatgtatatatttttctttctgtcttttagagaacagagctctgtgtgctcatgggagcacactggtcagcagtcagagaacataggttaaaaataataatagttctcatttattgagaacttacaatgtgccaggcttccggttgcccatttgatattacaactatttgatttacaatagcccttaaagttaaatgctcttgttatcccattttgcaggagagaaaactgaggctcagagaggttgtataagtcatccaaggtcacacagggctggtaaggggcagaggcgggacctcagtcactggtggactttattgtcgaggatggggatgggaaggagagcacctgtgccgctgaccttggtcctgaaacatcggtgggcactggggctgagctgctctttggaatgctggttctccaatgatgatacccatcctgcctcccccagaaatctgaaaagtgagagaagataaagtagggaaagggcatggaaggtgagatgcagagagacagtgagagagaggatcagagtcttctagaaggatccagctcctgaacgattgctctgggggaaaaaggggacttgatttgatatatgttttgagcaacactgttgctagggaaagtggttttcttctcgttagttggaagagagacattcagttttcccccttcttgccacactagtggttggaaacctgttttctgtctcttgcaaatagtgtctcattattcctaccttacaggttggttttggggaatccaggaaagaatattggaaaatccaagcctggtgctcacgcatgggggtgttgagcacatgtcctttagcccttctcctggtcttgtcagtagcccctgcctatatttgctcaggccatgctgataatgtgtagccagtccctgacccagaatgtgggtttcctgggaagaatttctgcagcccagccacccaagttcatttgcaatgcaggcattccctgccataaagctccaagctgcttggaagagttaggcttcacatttccctacattcaaaagtgcctggagtaaggatcatgttctgatggcggcatgtaaatgcctctttcaagagaggaaattgctttgaagttactgtttccctggctttgataataatctgcttaatgtcttgtgtcaaactaattacagcataattaccttttttaataacaggtacttttaattggtgcagggttaaacaattctgttgtaaaaatcggttgttttacattcatggctatagtttacaaagagctgggacaaccttgtaatattaaacactccatagagctgggatggcgcgtaaatgagggtaccaccatgcctcctctccatgacattgaacccttttctttgcaatgcttcatcttttcacagacagaatttcttatgccaaacacttggaaaaggagaggaaggatgctgttagggcctcatgtgttcacacacatcatcttgcttcattctcacatgtccatgcacaaaagcatgggaaagaggtattgctatctccattgtgtaggaaggtaaattgagggttagagaggttaagcaaactgacccaaatcacaatgtcaaatgactgaatcagactttgaactcatgcctctttcttccaagtcccaagtttttcttttttctttcttttttttattcttgtttttgtttttgagacagtctcactctgttgcccaggctggagtgcagtggcgcaatctcggctcactgcaacctctgcctcccgggttcaagcaattctcctcagcctctcaagtagctgagattataggcatgcaccacaatgcctggctaagtttttcctatttttagtagagatggggtttcaccatgttggccagtctagtctcaaactcctgacctcaggtgatctgcctgcctcggcctcccaaagtgctgagattacaggcgtgagccaccgtgcctggcctcaagtcccgagtttttaaaaggctgtatgattaagtggttaactaattgggagaggggtctggagtccaaatatctggtttgatcgcaggtctacaaaacagggttggatctacaaaacagcattaaatcaatgctatataattaagtggttaactaagtgggagggggtctggagttcaaaatatctggtttgatcacacatctacagcataattgctttggacctagggttgtttcttaccctttctgggcctcagtttctttatctgtaaaatcgagaggtaataatagcctctacctcatgggttgatcagataatataaaaataacaccgggtaagtgtctaacatagtaggtactcacacagcagtaactcctcctaacgcattgatccaatcctgtttttcttctcccagattctttctttgtagacccctgagcaccccatggatgtattttctcacgtcttggctgggaaagtgcacacactcatttcattactgcagctttttgcatttcattaaaaaacttgacaggccatttcataataatttattagcagagagtcaatttttattaattacaatcattaatttatcagtgttcccgtcatctgaagtttggtcagaaatgaaaggcgagaagtgcacagagaaaaatgggggaaagtggaaatctaggggatgaggatccagtggagtgggggaagggatggagggggctgtttgggctggaaggcttgatggaatggagctgccatcttgaatgcaaagcactgggcagggcagcacctggccccggaacctaggggtatgaccattgaatgatgcttccttcattcatgcaggaacaaaggtggtttaggagtgacaaatggcaggggttcacagactttaggagcaaattcctccaagttctggctctgtgttgccctccaacgtcttctccttcccctttccctattgctcactctgcctgcatatgtgtttttctagttgacatctgtccttccatgttgtaagctccttgagagcagcaaccttgtcttggtcaatacttggtctctggggtttagcagagcactcagtgaatacttgttgaattaatgaataaataaactgtctgcccacccccgttcattttatggagttggaggttgaagcccagagaggacatctgccctacccacagtcacacagctgactagtggctgagtcagacccaagagttaaacctactggacctttgacgagtggcctttgcataccttaatagtctccccttttgtggcttggctttttctctggcccagccttcgaggtctctcttattcatctaaaaaaggtgaaatgaaaagcaaacatttggatcgagaacatgggttccccctcagggaaggtcagagtctgtttctttctgggccctggtctcgtctctggcacccacatcctggctcaatgtctgttcctctctgggcaaggggcccttcaaatggcctcactgcagaatcactgggggagctgagctggggaaacatttgagtgctggggtccactctggagctgtgatccacagtaacactggcactgcgtgaagtgtagcaaccactgatcttcctgctgacactacccagtcaactccattgcccactgccctgcatcccacatctgtgtgggagtgcttcctcccattctctcctctttctgctcttaaagaccaggatggaattgagtggaaacatcatccctccactgtctcatgtgtcccaatcccagttcactggagcagcaggacatcttctttgagagttggagccccagggtcacacagaccttggtttgaatcctagtccatgggttactgtgaagactgaatgtcggtgctcatgccccagccaggagtaaggaggggtggtggtgggcattaaagagctgctttcaggaggtggtatcaaggcaggggacagatgagtaggaattagccggggacactgctgaggatgtgggaaagacattctgggcagaggtgatgctatacacagagacatgtaggcaaacccagcacggtgtgtcccaggcaccctgagcaccttggtaatatgctgagtgtaaacttcatggcagagaatgccggggaagggtggcagggaccagattgtgcaggatcttgcagggcatggtaaggtgagtggcctttgtttttaaggcaatagggggccatgggagggtttggagcaggggagtggcaagaccagatttgaattttagaattcaaatgtgtcagggggatttggggaggaagtgtggaaacaaccagtgaagaagctacaacagtcattgcgggttgcgagatgatgttggcctgtccagatttgtgaggacatgggaagtgactgtgggggatggggagaagttggattcaagaagaatgaagaattctttgctgagattcttccccacctctatcccatccttaaaagtcaaacctcaagtacagccccttgcatgaagatgtcatgggccatctaccttcctgaactggaaggattctcccctctgacttctgaagccatcagatatggcatcatgagatcatgaagtttctgggtctggtctttttggggaagagtctgtgcccactatcttctgtttcccatcatttagtttggggctcggctcaaatttggcatgggatgaataactactggatggaagaatcaagtagtgttgaagccgttgtccacaccctgatgccaacagcccaaggcacagcaaatatatgaattatatcatgcctcattcctcagaaaccttagtggtggtacctttttttttttgcctagaaagtaaagctgagccttattgactatattggtttttctgtccctgaacagcttaaaaaatatcttaggatctcagctcagttcatccacaattccctgagcctcagtttacttgtttgaaattgggggtatgcacaccaatatttccaggtggctattttctgaatccccttaaaacatgaatgtttctctggattgagaggaaacccgaaatgagcaagctcccatttcacaaatgattgtggcacacttgggttgtgggatctaccaggattgcagcaggagtgcccgacagagaggcgttatggggccagcctgttcttggccagaaacatggcacacgggagaggctggggagagagtgattcaagattaataacccggttattggaggcactttgttctgacttgacagccatcatgagccaggctggggacagttggccgcttgcagatccagatctgtcatggggtttattgtggcatagtgtctcctgccagcagcaagtttggcaaaacattccttgcacgcttctctggggcaggagcagtccaagagctccacaagaccccaggctccctgtgagtccagggaaaagtcagggactctgaggaatggggtttgcaatgtctgaatcatattgtgtgcttggaggctgtggacaagcggtctttgtattggatcacaggctttgaattgatttcctgggctgggttcaaatgctgaatctgtagattgaaactctgggaccttgggcaagaggtttaactttacttagcacagttcctagcacttagcaagctctgggctcatggcgaagggcataaagaaacacattcaaaaagcccaaggtcacacagcaagttaagaacgatcccaacttctaggcgaagatttttcccggagcacagctgtaaattataaggctcagtcctgagggggatttatcttgatagattctgacttgggtagtgatgtcaagggaggagaagagagaggaatgaaggaggtcccttttattattgatgtcaagagtcaggacaaattccgaccccccttctttgtttctgctttaatctcttttttttttttaagataagaatgcgaagtgtgatatgcttgtttttatatcattcagctaatgtttattgagccctttttatgtgctagaagctagggataaattcatgagtaagaacaggccgattgtggtggctcatgcctgtagtatcaacactttgtgaggcccaagagggaggattgcttgaggacagggtcaagaccagcctgggcaacatagcaagaccccacctctacaaaaaaaaattagccagactcagcgggtgtgccagtagttccagctactcaggaggctgaggtgggaagatcgtttgagcccaggggtttgagactacagtgagctacgatcatgtcactgcacttcaacctggacaacagagtgagaccctgtctctaaacaacaacaacaacagcaaacccagacatgatcccttgcttttgagggcttgggaggttttacagaaaatgtggtcaaatatgcatgcaatgctaaaacaatccagagctctttcaactacaaactcttatgaccatttggaactaatttttagaaaagtataggaagaatactactcttgagatatatacgatattggctaaactgggaagtttgacagcaaatcttttttagaaagaggatctatctaggaagaaatatttcttttctaaggcatcatttccacccccatccccatcacattcactttgaatatgctgtttcagcatgggagttttttctggaatgtcagttctatcgatttctaacatatatatatggagatatatatatatatatagatatatatatatatatatatatatatatatttaattgtgttaaaatacatatgaaatgttccatcttagccatttaaaaaatgtacagttcagtaatgttaagtgtattcaaattgttctacaaccaagtctagaagttttttatggtgcaaaactgaaattatttacccattaaacagctcccccttggctccttcccccagcctctggcagccaccattctactttctgtctctgtgaatttaactactctagatgtctcatataagtggaaacattcagtatttgactttctgtgattggcttatttcacttagtataatatcctcaagattcatccatgttgcagcatgagtcagaatttccttctttttagaggctgaataataatctaccatatgtatatgccacattttgcttatccattgatccactgatggacacttgggttggcttcacaatgctcttggctgttgtgaatagtgctgctttgaatttgggtgtacaaatatctgttcaagctcccttttttcccattccccaggacatattcccagatatgaaatatggaatttctgagtgatatgatcattatatttgtagctttttgaggaatcaccatacattttgcaaagcagctgcaccattttacattcccaccaacagtgcacaagggttccaatttctccaccccctttcccacacttgttactttctctttttcttacatttttatactagccatcctaatgcttgtgagacaagcacctcttttttatagtaggtgagttcacagcatgctttgtgcttcagaacaacaggtgaacatcctttccttgaccacatgttgttgccgtttgctaggggttgggtgcacagtggtgcaccagatgtggtccccaccctggcgacacaggcttggatctggcctgagacagacggttgtgctcagttccaaatgatgctgaaggtgtctatagggaaagagcaagacgggagctacttgaacaggccttaacagatggagtggtttcactccattgcctttggcatgggaaaacctgggttcaagtcccaactcagccacctttgagcttggtgagcttgaacaaggattttgtttaactcagactcaatttcctcatttgtaaactctaatagtgatgcctatagtcttgatttattgtgcaggttaaatgatttatattaaatatagattagataaagatatatccacatatatctaattcaatctatatataatctatatgtcccttagcatagtgcctgggaacaaccaaaaaaggatagtatctatttttttggaaggggaactcaggtgcacagagttgagtagacaccctctgcaaaggttcttcttttgttttaagttactccctgtctttcatcttccatccttttttgttttgttttgttttttagagacaaggtctcactccattgcccaggttggagtgcagtagcacgatcatagctcactgcagcctccaacctggctcaagggatcctcctgcctcagcttcctgagtagcagggactataggcatgtgtcatcacacccggataatttttattttttattttttgagacagaatttcactcttttcgcccagactggagtgcaatggcgcgatctcagctcactgcagcctccgcctcctgggttcaagtgattctcctgcctcagcctcctgagtagctgggactacaggcatgcgccatcatgcctggctaatttttgtattattagtagagatggggtttcaccatgttggccaggctggtcttgagctcctgacctcaagtgacccacctgccttggcctcccagagtgctgggattacaggcatgagccaccacacctggccttaatttttaattttttttgtagagacatggtctcaatatgttgcccaggctggtctcaaactcctgggctcaagtgatctttctgggccttccaaagtgctggaattacaggtgtgagccactgcacctggccttcatctttccatcctaatacctctcctcttcccaccctggccaccatcctggtttatgtttcctccagcccactgactggccattggtatctattttcactctggaaaagtacatatatatatatatatatatggtgtgtgtgtgtgtatgtgcttctgctaagtacagacatggtttccagtcctcctggctctcactctacttgctcagcatggttttgagatctgcctctgttgctgcatttagatctggctagtttcttttgatagttacagagtatgttcctagtgcgcctcccaccatggattccttgcggctgctctgatgaagggggagtccaactttgtgtcagtagaactgggatgtaacgaacatccttgtgcatatcttcttgtggccccaggaaaggatttcttcaagctctgtcaccaaagatgggattactggctcttggtatctgtacacttaatttcactgagtctagccagactcagatctcagatggctgcattgttcacactctctccagctgtacgtgtgaattcctctttcaccacatttttttgtcaagatacgatactgcctttctctctgacttttgctagtcaaatggggaataatgtgctacttcatggtgattttaagttattgtcactcaccattagtaattttgaacaaatctttaatatacttagtaattttctttcacttgctgtgaattgtttacttatatattttgttcacttcactactaggtttttaaagtgtttttttgccgccagatttgtatatctctgtgttttctagatagctattctttgcaaatctcttgttccactctattagcctcgtgctagctttgtctctggtgtccatgggtcagatctctttaattttgacgtaactacatgtgtccttttaccacttctatgacctctgctatttgaatattttcaagaagtccttactcttcccattccagatgacaaaaatattctcctccattttgctttcacttttcatgttcgggtatttaatatatctggagtttatttttgtgtgtggtgtgaggttggaatccacctgattgttccacaaagagtgatttaatttttcaatacactttattgaataatccatcatttcttcactctttgagatttgtgatgctctacgtatgtatgtatgtatatatgtatctatctatcatctacctatttacctgttatctatcattcatctatcatttatttatcttctatcaattatctatctatctatctatctatctatctatctatctatctaatctatcaccattttgctccacttgtctgtttttaaaatacgctattaatatggtttaaataaacaactgcaaaagctgagactctcaatgggcttatcagaaatcacgtctacaaaggcacgttagaaattacctgatctgatcccgttgcatcacacatggcatgattagtctcagggagaaaagctccccggtcaaggacatcatgtcagaaatggaattcctgtctcctgacccccatcctcatcaagcagccctgaatatttgttccattccatggcacctgaggtgtttggatgggagtgagtgccttttaggggcaaacatattccaagccttaatgatagattaaataccaaataccttaacatttgaaaaaatgacatttgattacaccaggttgtaaacagagaaaaaattacaatggaacccagtgtagatcttacatgaacggcacccattcggtgtaatgactctgagaatgtcagtgctaacaagcacataattggcaccggggagataatttttgccaccttatgcagaggggaaaccgttctgcataatgattttactaggaatattctttattcagcaggcccatttgcataaccctcccaactttctcgagttaatacaaaatgctctggagacattgccaagtctcttccagaagacgtctgcttcttgaaataagcttccattttgcgagcatgtgttacgtgccaggctctgtgttccctacctcatgtgcagtatttacatttacagacaagcatctctttgctggacatttcttgagggctgagttcttttctttcctattcaccatactcccaaaatctaacacaaagccctggatgcaggaggtgctcaacattgttaaatcaatgtatgaatgagtatcgtgactaccctgtgaagtagaggcttttgccacattattgaaattgctttctaaggccaaatgctaggaaatagccaactgggatttgaatataggtcagcctgactctcgttatatgtattttacaaacatcttctatctttcctttagggagcagagtgtctagtttcacactggccagtatactaaccgccagctacatatgattttttaaatgtaaattaattaaaatcaaataaaatttaaaatcagatcctccatcattaaaccatgtgtgatctattgtattgaacagcacagctctaaaatattccatcattaatagagaaaaattctactgcagagtactgtgtttgtatctactcttgagtagatacaatcgtgttttgggtcatgacttagatatttgtgtatgtagtgctggaacatgcttgagctctggaatcacacagacttggtttctaatcctagctcaggacttgactttaggtacaaagcttagcctctcagagcctgggtttccttttctgcacaatggggataataacaggacctaactcataaggctgttgtgaagattaaaggtggtgatgcacagaaagcatttagtgaagtctctggctgtgaagatgaaagataatggtcctcatcctacagtaaggaaacacattcagagaagtgatgggacttgtcaaggttctcacgccagtgagcaggtcccctgggataagagccagagtctgcctggtgccaaagtgtgggagcttttggtaactgtggacgcctgtctcttaaagcctttcctttgacaagacagagaagactgcagtgcccacaactgcaggtaatccagggaagacagggagtggctgaagaggtgtgtccatgacaaagcagtcctcctcactaaccaaagaagtcacggttctcacaaaaatttgaaaagaacattttattttatttttatttatttaataaaagtccttttgtagctacctgcactaggcatggctgggacatttcttgaactcttccttcccatggaagaatgcatgatatgctgaggtcttaccacgatctcagctcacgcaacttccacctcccaggttcaagtgattcttctgcctcagcctcccaagtagctgggattacaggcacgcgccaccacacacagctaatgattgtatttttagtagaggtggggtttcaccacgttggccagactggtctggaactcctaacctcaggtgatctgcccacctcagcctcccaaagtgctgtgggattacaggcatgagccattgtgcccagccagaacattttattttaaaaataaaaataaaaacttagccaaaccaaaggcaatctttattctacataatagaaaagcaggcctggtgagagggaatgagtatcttaggctcacctacctgcttaatctatgaactagagtaaaatctcatgtcttttaactcttagttccattttttttgtcctgcattttaatgattttaaaataactagactttttgatggttttacttattgattagggccctttcagtgacaaatacgagaagcctaaatgaaattgtcttcacttagacagggaatgtattggcttatgtgagtgaaatgggtcacagcttcaggtatggctagctagctccagatgctcaaaccatgtcatcgggaatatttgtctttccacctttggctctgcttctctctgagctggctctgttcttggggcaagaatttctcttcactgtgttaagatggccatgagcagtggcaactctattggaattatttgtccctcattgccagcagaaaaggagtctcttttctgagagttgtggcaaaagtcacaggactggctctcattgaatggcttgggctgtggaccaatcacagtgatctggaggaataagacttgcctgtggtgccaggggcaaggattagtgcagcaagagtcccgtggactgaggatgaaagaagggtctctaaaggaatagaagcaccctgttcccagaagatggggaaatagatgctgagtggcaaacacaacaaatgtttactgtacattgtctgggtctctgcttacgatgaccctgcccacttgcctggcacagggtcagaattgccagcattgtggtcttcatcaacaacaagaatttaaagggtaataaaaggaggactatcagttgcttgcattcatgactataaaggaggattcagcgtaactgagagctctgagcacagagaggtgtggatggagagaggaatgccatcgaaagggtcactgaccagtggcagggaaggcatcatagctgtgttcagggcaggggttggcttgtagattaagcttccgattgctcaacagaaccaggagctccctttgggggatgtgggcaattgggaaggcttcctggagttggtgatgattgatctgggcttggaagtataggtgagattggcatggaccgaggggaatgcatttgaagggaagaatatattaaccatgagataaagtgggcagtctagcaatgtgtggagaagaaggatcaaagatgctggttattttcttcccctccattccctttatcttcctttcatccttttatctaggactgtggctagcccatttggcacctgtgtgaaaattggtggtaggctcctcctctggaaagaacccaatcttgtccaggatatatagcttcaaagtacagcgtgaattggtttttagcccctacctgtcccattgactggacatcttgaacaagcaatgagtcagacaactgtaccctgtagtcctcttccttccttatcccttttccttccgttttttcctcccctcatcctcctccattcctcccagttcttattatgcatgtccagaaaatatgtcccctttcatctttggccatccagctaacctgtaccctgcattacccaggaccatttcagcagcctctgttactgcaggcaacccttgccctttgtttttcttgccctgagagcccgcacctctgaggctgccaaagaaccctgccactgcccaaatccatctccaattccgccctgggtgaagggctttaactcataggcccaggccccccttttgacaggctcgatttggctccctgcacatctgggcctcccatctggcccccgcacttcgcctgtgcgggttgctttatggatataataaatattccttccttaatatgatttcgcttaggttcccagtaactcactcaagcaaatcttccatttaacacatgactttctcttcagagggagcagagaaaatattgttgttggaagaggcacagctgtgagggtttggggaggagtgtgtccacctaagctcaaagtttgctgctgcccacaggcctggccctggtaagacctcagcatatcatgcgttcttccatgggcaggaagatttcaagaaatgtcccagccatgcctagtgcaggtagctacaaaaggactttagatgtcacatgcagcccagtgacgtagtgggtcacacctccactgcttggtgtgtggagtggggccaagtccattatatcattcatctggatggtggagagggccaaacttaccacctagtcagttttttagacacataaaatagctttgctttcaacacgatgttttaaaattacaattttagccaagatttgttttatccaatgcttaagatatgaataaatgggactgtcaaacaaagatggccgggagtcttttagcgacaactactggttaaactggttatagcaacctagctctatctattttatcacctttgagaggtggaagaaataaacacttattgagtggctacaatgtgcaaagttaattgtcgtgcatcgaatatttatggaatcctcacatttttttttaaaaaagagtcaagtttattgaggtatgatttacataacatttaccctttttcaagtgtacagtttgatgagctttgacgaatgtgtactatagtataaacaccaacactatcaaaatatagagcattttcacctcctccaaaaattccctcataccacattgaattcattctcctactcccaacctcatgtctgacaaagcctaattcaatttctgtccttacaattttgcctctcccggaatgtcatataatggaatcacacagtttgctgccttttatatttgccttctttcattttgcacagtgattttgtgattcttgtatattgctgaatgtatcagtacttgatttcgttgctgtgtagtatttcattgtatggaaacatcatagtttgttgattcacttttctgctgaactcacaatcatcttttgagttaatacatccattttaaagaaaaaactgaggttcaaagaagtgaagtaaagtacctaatgtcactcagctagcagggggctgccacaggatttggcacagacttgaactcgaattcttggagtggttgtaatattaacattttttgttctgcttattctgctgaataacctcattggatcaagaatatacttccggctgggcatggtggctcacgcctgtaatcccaacactttgggaggctgagatgggtggatcacgaggtcaagagatcaagaccatcctggccatcatggtgaaaccctgtctgtactaaaaatacaaaaattagctggtcgtggtggggtgagcctgtagtcccagctacttgggagactgaggcaggagaatagcttgaacccaggaggcagaggttgcagtgagccaagattgcgccattgcactccaggctgatgatagagcaagactctgtctcaaaaaaaaaaaagaatatacttcctccacagagcttcatttcctccttccctctctcaataaaaacttgataaataaacaggtaagcaccaccaggactaggaaatgagctgtctttgatgtcctagggctgtgctggagggaggagaccagccatcaacttcatgtgttcagcagagatgtatcagcgctttgcaagagggtacttgcttgcagagattctaactatggtgtagggagttgagttacatacccctaattgtctcttcttcccttgactttcttattagaagaggagtgttttgggggaagaaagcctgagtaaaaatgctgttctgctatgtgacattgttatttctgttccctgaacctcggttttcccatctgcacaatggacgcctttctctgagctgtggggaggatcatttgaggtgtcatgtgaaggcaccagcacagcagggagtgcccttctggttcccatcccacatcttccccactgagctatataaggacagaaacattctttccactttggtttctctacatgagcgactccatcctgcatggagtaggaggcatgcccttggtttcccgggaatttggcaggtgttgggaatccattcctagaccctgcctgcctcacacacatgcttccgcttctacctggcagagaagctacaaatcaaagtcctcggtgtggcgcggtggctcacgcctgtaatcccagcactttgggaggctgagacaggcagatcacctgaggtcaggagttggagaccagcctggccaacatggcaaaaccccgtctttactaaaactacaaaaattagctgggcatggtggcaggtgcctgtgatcccagcttcttgagaggctgaggcaggagaatcacttgaacccggggaggggtggcgggggttgcagtgagccgagatcgagccactacattccagcctgggtgaaagagtgagactctgtctcaaaagagaaaacaaaaagccaaaaaacaaagttctgtgcattaattcttccaaggcgtttataacggctggagggcatatttcatgaccagagaatggctctcttcctgtcttatcataaccatctgtgcttgtcctatggtgcatgccctgactaatccctctccccagcccccctgctgccccctaaaccctctgctgggcggttctcagagcccatccatcttgacaacagagggctctattggttgaggaccagctgtgcagagggaccaccttacatctcctgcatctctcaccttcctcccaagtcttgtgggaggctggatccgcccttgtttcttgccactgtaccccatctggcttttgtaacacgaggacatacaaaagcagaagctgaagcttagaggagttgacttggattgcccagggcagcccaggaaccagacaataagtgattcattcaccgcgattgagatagtcctctgtgcaggcgacttcatcacaccatgtcactgcatcttacagaaaccccgcaagagagacaccatgctcatccccatttttcaggtgaagacactgatgctcagagaagtgaagccacttgtccaaggtcacgccgctgggtgtgccacatgtgcctctttagtagaggggccggggatggtgacttagtgacatttgagcagggcctgaaagaaacaaaggagtgaaccatctgaagatctgaggaagagccctccaagaaggggagactgcaagtgaaaaggctgcgaactgggaacaaacttgagaaagaaacagaagggaactgggcatcgtgcttcctgagtgagagcaacagggctcgaaaatgaggtcatagggctgctagagaccaggccagggctttggatttcactctgagggaaaatggcttcccaaatatcacacatgaaatcaggagccaatctgagttagaactaatgtccccatagaccccattttgggactttcttccccaataccaggctatgggtgaaactgggagtcatatccaggtaatcctgccccagagtgcatgctctcagcattcatgctgtgctgcatgtgacccactgatttgtgctatacactgcaaaaaaggtggagataggtggcttgccatcaggaagaccaccatcaatctaggttgaagatatagatacaggaaaggcatagctaattaagcccaggtggaataatacttggcaccaacagaacatcatgcgatttgaaatttgccttcctgcccttctttctctggcccctgtgctttccttcttcccacttcatcttttctgtggctctgtttataggtttcacactgtctagtttggagcaggatttaatcgtggtttcattaataaatcaaaggaagaatgacagtattgaaaaaaagaacgaaaagaagattgaatgaatgtgggggcacagagggagggaggagagggaagaagctggttccagtctcgtagaagtctagaaagagaagactccagcttttgccatcagtgcctgcaggtgtgatgtgggtaggactttagctgggtgtggacctagaaggagaagcaggttgaaagaggactgtttaagattggccgtagggtgggtggcgctgcttctgctgctgctccagcctttggcgtctacacttttcaaaataaaacacgaaccccagacgtgggcatgcaaggcttgctgtgaagttctgacaagaaaatggacatccttgaaaaacaatggccacacacacaaaaaaacagggagcatgaagtccaacaactcgggatcagatcttgcagacatcatggaagctctggatctccatttgctcatctggatgctggaatgataaccactgattccaatcatccgactataaatcagcaagcagaggaccctttggtttaaccaacactcctatgaaatagagcctggtattggggaagaaagtcccaaaatggggtctatggggacattagttctaactcagattggctcctgatttcatgtgtgatatttgggaagccattttccctcagagtgaaatccaaagccctggcctggtctctagcagccctatgacctcattttcgagccctgttgctctcactcaggaagcacgatgcccagttcccttctgtttctttcttaagtttgttcccagttcgcagccttttcacttgcagtctccccttcttggagggctcttcctcagatcttcagatggttcactcctttgtttctttcaggccctgctcaaatgtcactaagtcaccatccccggcccctctactaaagaggcacatgtggccttcctaggttttctgacatgtttgttcactttacctctgtttccccacaaagataagtatgtcatctgcctccttcaacagccatatccctgaggcctagaagagttgatacttgattaaccatatggtgaattaatgaatggatgaggtttctggctctcttggcctcaggcttcccctctacaaactcagagagggagacagcatcctaaaacgtgtgtgtccccacgctttcccccctgccacccggcaagaagggtgtgtggtgtgcagtatggggccttgtgtggcccagagttcctgacgaatgaggctgatcctggtgacgcaggctttattgatctgagcaggttgtcagtgaaggggaagttgtaattgttgctgtagtttcattgtaaccaccagccccgaagggaaattaaactttgcagctaatggggctatatgatccttcaacctttgatgtattgaatccagtgtggtccctggaatactgagcgactgctcagagcagtcgtttttaagctgaagcggtctcagagctgatactctttttaggcctggagaaggggtggagctgaatgactcctacattctttctttccacccgttttctaaagaggcttagagcgcctctaagaatcaaaccatgaagtatttcagctggaaggagcctcaaggcataaacacccacatccagcttcacctcctccaatccaggctctttacggtagccccacaagctactaaaggccagctctgactctatcacgtcctgctgaaataccatctgtggaatcctgttgtctggaatcttactactcaaagtggacctgcagcttcggccactcttgggagcgggttagaatgcagactcctgatcctcactccggatctgcttatctggaatctgattcctgttcacggtagtttttaaagcactggactggaggatacattctaagctaattttcatggcctataggcaaatttgatctgaagaggtaacacagtattaagagtccagggtctggaactaggcagactttgagataatcctgatgtggccaattacgagctgtgtggctgtgtgggatttccttccctgctttgaacctcacagggttgtggtgcaaatcaaatacatttttacatgcaaagtgcttaaaagagtacatggcaaagagtaaacacagaaaatagcagtgtcttttagctcctgccaaaagtctgcacacaggccctttatttagggctaagtgtaaatgactgatacagccaactaataatcaacatgataatcattcttatatagctctgtttttcagaggaggaaacgatactcggagaggtgaagcaagtggtgaaaggggatgaagagggaatttgagcacaaaactgtcttactccagagtctgggtgcataaacttgacttatgcatacttgatttaatttttttttttttttttgcaaactacctggtgagtagatttgcagatggtgaagcaagggctcagagacaggaagtggaatttatgcttcccagcttatggattgtagggagttttcctaattccaagttttccattcatacaaccagcatttactgagcatagatattgcatgaggcaccgttgtagtccctggggatcctgcagtgtctaagacaggctcagccctggccccccagagttaagagcagacaccgagactcttcaacatattgcaagggtcctggctctcacttcccaatgtcctggtgacatagaggactttctccacccttcccactaggccttccttctctccccttgcctctcaatccagtcccagcacacggcatctcctgggcatgcatccaagccaagtaggagatggggcatattttatcctgggaccatttctcgtcctgttattgacttacaggaaattatcatttcttcccagctggcattctccctttgtcatttctcttgagagagggactgggtatgggccctccatgggactcctgtgttctggctggggagctgacttctctggggctggtggctgccaatgtgtagatggggatgctgacaagatgaatgcagagacagcccagctagaaacccacacagtgctgggctggtaggcaggacaacttggtttgcatctctgatctgctatgctcttttgaatgatcttgggcatcacttaatccctttgggcctctgtagtctcgcccatgaaatgatgttcacctgctatgcacgtcacattcaagaatacgcctaggtcaccttacgtgaagatattgctatatgtaaacatccctcatagaaacattgtctgtattttacagataatacatgctacaatgattagtgaagtctcccaggagaagagggaacctgagctggtctcccttgcccctcaccctccctaagattccatctgaaggcctgtcactatgtggtagactttccatactccatcaagtcctccccagaaaaacatctcaatgccctgtgagcaggaacagtcccaggtgaaactccagtctggccatttatggcacgtgaccttggggaggccaaggtcatacattagtctgtattctccatgacaactgtattattttcttagtttcaactaagaaacaactgtattagtttcttattgttgttttaacttaggagttaaaacaacacccacatttatcatcttaaagttttggaggtcagaaattcaaaatcaaggtgttggcagcgctaggttccttatggaggctgcaaaggagacctcgttttcttgcctttttcagcacctagaggtcacctgcatcccttggctcatgactccaacctctgcctccacagtcacgtctcctgctaactctgctcttcttgcctccccttagaaggacccttgtgattgcaggataatccccccatctcaagatccttaacttagtcacgtctgagcagtcccttttgccatgtaaggtaacattcacaggttccagggattaggacatgcatacctttgggggaccattattcagaagaccacatcaacacttgcaggcaggacttcttatcatttggaaacagaggcccagagaggaatgtgaccactggtcataaatggtcaccctggggtttgaaccttgacctttccctgctctcaatacaatgacatgcctctctggacaggagttgatggcgctggagtgggggtggtcaactggagaacgtcctggataaaggctttatcatggaggattccaggagagaaaaggatgtatccttttcttgtttataaaaaccttgtcagggcttagtacagagcctggtacatggagatgcttaataagcatttgacgaataaatcaacataaggaagagaacatgaggcattttaccaaagaaaagcagtgataaagaatataatcagtgtgtcagattgtgaagggccttaaatgccagaacaaggaggttaaacatcaccataatacaactgtgagccactggtgatacctgataggaatgtggtatttcaaggagatgagtttggcattgatgtgcaaggaggactctagggaaaagagactgggggctgtagaaaggttaggaacaattcactggagcattcagcattttgccaagcttgcaaactcttgaaacagccaagaaaatataaacaagagaggctagtatgagatatgcaactgaattgtcaaaacaaaaagagaagtataccttgaccactgataggaatagtcacagctctaaagcactagatacccaccatgtgttataaactggactaggtactggcacctttccatacatattcttacccaccctccctaaatatgattttaaaattctcctttgcaggtgatgcaagtgaaagtgaggggtgaggtgattcacctatgtgggtacagttgggaagtggcagagccagcattcaaactcttgcacctccacagctgaactggtatttgccctggtgacatcttgtctctggggtaatgctgagagtgattggtcaaggatatacaataggtaaaatgagagtggttctaccttatccacaatttcgatttctgtggtttcagttacccatggtcaaccatggtctgaaaatagtaaatggaagatttcagaaataaacaattcataagttttaaatggcatattgttctgagtagcatgatcaaatctcacgctgtccagcttcatcccgcctcggatgtgaatcttccctttgtctaggtatccaatctgtctgcacaacttgccccttatccactagtggctgtcttggttaccacattggctgttgagatatcacagtgctagctttgaaagaataccttattttatttttattacagtatattattataattgttctattttgttattaagtattgttctgttgttaatctcttcttactgtgtctaatttacaaactttattataggtatttatgtataggagaaacataaatattatgtttaatttatattatataaactttaaagtttatcataggtatttatgtataggagaaaatgtagtgtatatagggttagttattatctgcaagtttcagacatccagtgagggtcttggaacatattccccaccttggataatgggggggaaccctgaattccactctgggcatatagatgacatatgatgatcatgacaggctaggactgctgatatggggagcctaggaaggttgaagggagaaaatcaccttaagttggaaatttgtgtctggctggaacttgggagaagagctgtagatggagatccagatctgggagttgccgcagacactgttggtgtcctcacccatatccctgcagccttgccttcgtagggcttgctgggatgacttccaacagtctaagggctttgctgttgtctgtggcctattctgcttacctgcatgcaagttagaagtgcctgagaattaccatcctccaggagcaacctcaactaaagattgacaggagttggtaaataaatggctcagaaccctggctcctcgagcgggataacttcaacaagcatgttctgcgttgcttcccagcattctccagcaggattaggctccagctgcccacgggagtttctgagttgattatgtacccttgattggctgtctttccttcctgttcacttctgcatcctcctttctggtgtttcctgggaccacaaataaactacttgtcctcaaaactttggctgaggatctctccttgtggtggagccgaaattcaaatgggaattctctccactgaactggaccatagactaagtagagaaatcagaatcattctttggaggtacggatacatgtaataggtgaaataaggaagagagttgaggggtaagcagaaaacaggaaagcctagaattctggaatccaagaaggaaattggcttggggatattgatcagcagtggcaaggtctcatacttgacctacaggtcaagtatgagagctggaatcaggtctcagatttagcaactttatgattaatgattatttggagggcaatcttggtaagagtgatgggatcagaactctatatccagaagctgaagaaggtagagcaaaatatagtaagcactattaatttctgataaatatttattaagcctattttatgagtggagtaccttcacatttatatcgttgagttctcagtgcatttctagaaatcagggcatgatacccatttcatggatgaggaatatggagctcacagtggtttgggtgacaagttggatcatcagcagtggaagaaaggagacacatgctggaaactgaaggaggagagtgagacatggaattttcatttattgaacacctattgtgtgcaagcctgaacattactagttgtgtaatcttgtgcctatcacatataattagttgcatgttcattgttacatatattagttattagtaatttatatataattagttactatctgtagaacatttagaacagtgcctagtacaaggtaagcccttgataagttagtgattactatttttattattaatgtcaatattattactgctataattagcagtaatagaaattagcaatgatgtatatataggtcatagcatctgtgacctatagcagccaaaggtagtcacaatctccaatttatagatgagatcaatgatgctaagaaatgtgtccaaggtcacagaactcgaaagagtacagcttgcatttgaattcttctctgtgtgatttcaaggcccattttcttccattgcagcagcttgggcagggttttatcaagtcataagtggcttgtgatagattgaagggagaggagaagaagaaaaattgaagatgagagagagttaagtggaaagcaggtgtgtctggtgttgtagagagtgtgatcagaaggccagatttacagatttgccctggatcttactacacaaacaagaaggaaggaggagaagtgaatttggcattttggcaacagtgaattgcgggtgagaggttcctgttcagggatttttgctgacctgagaaaattctgtttcatgtttttaagctggtgagcatgggaggaaggatgggaggtttaaggagcagtaaaatctggcctggtctttatgggcatcgtggcccataatagaatcatggcccataaaagactcgtgcaggagcctgcaaggactaggggagatagctcaacttatctgtgtgataggtcatcagtgtcctgctcctaggtcaaaagctgcaagtcttgttggctcaaagatcaaggaagaacaccaaaggcaatgtagcatggtagaaacatcaaaaacttcgagtcagacattttgggcttgaaggggggatctgccaacccctagctttgtgacttgtgcctagtcaatttccttctctgagctttagatttctcatctataaaagagggttaatagtacttttcttacaggtggttgggcagatgaaatgacatcatgtttataagtgtgcctgaagtatagaaagtcctgatagcagatatgaactatcattaatatagtcacgacttagaattttccccaatttcctaatgcaagctaaatcaatgtctctctcggcaccttgcttttctccatgggaaaactgacagagctggtgtattttctccatatctggttcttgaagtctgcactgtctttcatgaacttgggcttggaaaaatcctggcctgaaccttggcaagactgaatccccagacagacagattttctgtggttcacctttcctcagatgtggacagggatgcctcagaggaggccaggtcaagcatttcatgagcagctcttaccttaggtggagctctatggaagagttggagttatgggagttttggtgtggcttatgggaagttcaggcctttgtatacctcattccaccgaagaaagagatcatgatcctctggggagaaaagtatacactaagaccttaattcttgtttttctttttaaattaattgagtgaccatttactgcacaccaggaagccatgcaataatgcaggccacaccaggaaggccaggccccagggagcctgccacccaggagctgtccgtggttccgaaacctttgtgttggcattgtggaggggaacccatctctggctctggttcatggtctctactctgagagatccttctgagttcacttccatatgatacaatctgcaagttctgacacacatcctatatgttaaaaaagtaaccttcaagcacctaatagccctgattctattctagtctcttttaatgaccaacaactcctgtagttaaactctagctggaaaacagaaggaaaacttgaatctctgacttagatcccaacttttattccagctatgctctagcaacatgtattgggaagattttaaaccatctttaaagacaactgtgttcatcacaaaagaaaggcacagggtagtagaaagacctggtttgaatcatgactgcttcattgaccaggtatgtggcttgaacaattttttttttatctctctggtccatcaaaggttcactttttttcaaacacactgcccaccaccttctgggaagccttttttctttgagacagagtcttgctctgttgcccaagctggagtgcagtggcacaatctcagctcactgcaaatgccacctcccttcacctcctgggttcaggcaattctcctgcctcagcctcccaagtagttgggattacaggcacctgcccccatgcctggttaatttttgtatttttggtagagatggggtttcaccatgttggccaggctggccttgaactcccaacctcaggtgatcctcccacctcgccctcccaaagtactgggattataggcatgagccactgcacctggcctctgggaagcctttagtgccacctctaatccccactaaatccctctgctggggtcacgctatatctatttttgtcttagccatttctaagttcccaaggtacatattcaccccatatttatttagtcaaatatatttatggatcttatggatttgattaaaatcaaataaatatggcagatcgaacactgaatcagcagtcaggacaacttggatctactctgattctgctgtcgtttttctgcatgaccctgagaaaccctctgctcctttctgaggtatcagtttttgccatctgaaaggcaacaggtggtattaaataaatgttaagggtagttccagtcttttatttaatacatattcaatgggtacttattaagcaactattgtgtgctaagtagtagaagttctgatgaaggacaaaacaagaccctggcctcaaaatgctcttattccagtgaggcagggaggacaatgatcagataattaccatggcacatgatttgttaagttctaagactataactggtatcagcacaggtggcgactgcagctccaaagagaggtaggtaacccagcctggagtggtgaagaacagtggtgcttcctgggggaggagctctctaagataatgcctaagagaagagtaagagttgcttactacagagatctagggggaagtttaaggagttttcagtggagaaaaaatcacttgcagaggcttgggtatctaaggggtattgaatatttgtgaggccacagctgaagcatgagctgtgtgtgtataaaagggggagtaacggccgggtgcagtggctcacgcgtgtaatcccagcacttagggaggccgaggtgggtggatcacctgaggtcaggagttcgagactagcctggacaacatggtgaaaccccatctctactaaaaatacaaaaaattatctggataagatggtgggcacctgtaatcccagctagttgggaggctgaggcaggagaatctcttgagctcgggagacggaggttgcagtgagccgagattgctccattgcactccagcctgggcaacaagagtgaaactccatctcaaaaataaaattaaaataaaataaaataaaataaaataaaataaaaaataaaataaaataaaacaaagtaaaataaataggagtgtagatatcaagaggctggcctaaaaatgtaagcaaggaccagaggtctcatgggtcacattaaagtgacctttatctggaggaaagcactaaggagtttaatcaggagaataatctggtcagattacattgcagaaagcatcactggttgcagtattagattggaggggaggaaggttagattcagcagaccgctagggtgcatccaggtggtggctggtactagggcagtgatggtagggaaggagaaaagtgggtacaattgagagacatttacagggtcctgttgactgggtgtagacagtgtgagaaaagaaattgagttctctagtgggaaaactggatgtctgcacagccatttattgaacaaggaagagcagattgaaaacatggctgggtgtgtgtgtgatgctttccgttttggacaaattgactttatggtgccatggggcatcccaatgaagatataaaagtttagagctcagaaaaccggtcttgatgggagttagagacaaaactaagatgcaaatggctctgattttctctccttccactctattccctgaaggatcttttcctttcctgaactctttgagcttgttggtgccacacaattaggcacttaattgctttctaattgatatgtgccttagcctgtctcaccagataaattcgcaagttccttgagggtagagggctccttataatgccctccccaagactccccctgggcaccacatgagatttgtgagctatctgaatggaggatgggagaatttaggttgttagtcatttatggctgctctggacctcagttttctcatctgtagaatgggagccactagacttcctcctgtcattctgtgatctcctaaggattttagatttgttcatcccccagaatgtcaacgagggagctaggggcagagtgcagctcattacacctctgaaatgcatggccctggactggtcgaacattaggatgtttaggaaggaagcagacgtttaaaaaaaaaataaaagagagaagaaaaattgtttccctccagtagtagcaggcactcagcaaaacaaacaagtctaacggaatgctttgacgattatacagacaaacaaatcactttcccaaagtgcttcttgggggaattacggctcctggaaatgaaacacaaacagattattaaaaaagagctccccgttgggagagaaacagtatttacaagagaagatgtgcctagccggacctctaattgccgttcattatctcatattgatttaattagctgttgcactcaggtctgaattgcctgctgcccgcagcaggggactggcgaagagagggggttcagattgaccgagcaggcttctaccatccctcattctcctcctccctttcccctgaaacaagagggtcagctcacagggtgtccttgcggtggcaaagtggcggctggcggccggaggcggccagccacgtccaaggccttgggggcagctctgtctctcacatgcctcaactggggtggctgagaggagctaattagccacagtaattagagacagtgtcttcatagtgtggaattagagtggtttggtgaaagcatggggagatatatggcccaggctggctgtggtaatgggggagaagctggcagaggggagatgaggcggtctcctagagtgtcctttggcccttgcggggtgactcttttacccctttctccagggttgccactcccatgtcagcctgttcagccctttgtggctgctccacccctctgtgacccagagactccaactgagcagagatttccgatgaaaaaggaaggttattaacgtttctctctagtgggcgtctgggaccaattgttttgaagatttgggttttataattgcaagtgattaatgggggagttggcaatcaggcttaaaaggttgctaattgctcttttaacataattgtgtccgagcaagctagagcgctgtgcgcacgggtttggcatgcagaatgcgctgcatggggcattaaatggtatctgtgcctttccttcctccctccatccattaaacaaatcttgattgagagtctgtggagctcctggcccaatgctggctactggggacacagctgtgaatgaggcagagcccctgccctcaagcctggtgagctggggaacactgaggaatggaattcccttatccgctgtatttgtgccaagacaactgagccaatccacaattatagagaacgcctgggaatttaacagtgttgtccagagagaggacgatgggggaacagtgaattgagtaggttcccactcacttggaagtgtttaataggacgactgtataagtgcagcacggccaataagcagaaggaaagcaggctgaaaaaagatcttccgagtctgtacattcagttcctgcactgctggaactcaccctcaggctgcctcactccgggcctaataactttatatttacacaaaattataacaagcctgatgattacattttttttccacaacaggtaaaaagcagtgatatctatacagagcacatctcagaagatacgtgccacctgacagagaagggaattcaggcttatggaggcaaggattacccaaggttgcataatctgtgaattaggtttcaggcttctaatctcatattctttgcatcaggcttgcgataggtccccaaagaccagagaaaaatcccttagagtctattggattgaagagtggcaagtagatttcatcttgctcacaaattttgcattttttttctttttttttttgtatttttttgtaaaggctgcttggaatgttgcgtagggaaaggatttgaaaggtacatttggtcacggtggggaaaaatcagtgatcaatcagtaatctctgctttgactaaaggagaaggtacagtgacgtggatgcacaaatttgccatccttgataaaatttcatctccttctcttgcagatatgcagccaagactctcaaagagtggaagtgacttgcccaagcctcttgggagtccctttggcaacgattaactcacctgttcccataggtccagtcctgcagggaaaacaggaaccgtggcttggactcttgaggagatgacatattactgagaggggccagatgtagataaatagtgtgtgcagagacagtccagagaaatagtgaagggagggcatcactcaggaggaggatcttggaggactgaacaaattaatttgggcagccgaaaagattgagggaggatagctcaggtgggaggcacagcaagggcaaaggcagagagctggaggaaaattgtgtgtgtgacagagtcaaggaagaggctggcttcattagaatggaggctgtgtgttaggaagtgacggggagaaaactaagaatcccttaaaaaaggaggatctttcattgctctggtccccttgtagtgatcatggtgccgtgtacacactaggtactcaataggtgttaagtccttctccagtcattcattcattcatgacatcctttcagtgtcattcattaattcaacaaagagttagtgagtgcttagtatgtaccagatctaggactgagtgctgggaaacagtaacaaataaaaaagacaaggtgtccattcctgtgacacttaaccacctggcaggagaggctgcatggccagaggcatgagctctgggctgggcatcaggaggcctgggctctggtctcctgcagtcacgaatttgcattgtttttctgagaatatcacttgcctagtctgaggctccccttgttgctcctgcacgtctgggatccaaccctgcttaccactgcctgtcattctgctcaggggtccattctgctaattccctacactctgagctcattcccaccctagggtcttcgcaaatgcctcctccaccttccacctggctggcttctgcttatcctttgggccgccctgtaagtgccacctcttccaggaatccttctctgacgtcctctgtaggatcatccctttgttctgggtcacagtcctcttttgctccacggagcacctactacaccttttaagtgtccacttgctgcttggttaccttgtgtttttccctctagtttgagaccaagtttcccattttgttcccattgccatgcccagtggttggctcatagttacacacatgggcaagagtgaatgaataaatggccaattttgctggactttctcagaatcagtaatcaagaccttctcactgggataccaggagacctggattcttattctgactcaaacactcagcaggtgtgactctgggaaatctcttcacctctctgatcttcagtgtcttcctctgtaaaatggtggtaatcagtgtatccaccagagtgttgtcttgaggacaaaatgagattaaaaaatgactgaacttggctgggcgcggtggctcatgcctgtaatcccagcactttgagaggccgaggcaggcggatcacctgaagtcaggagttcgagatcagcctggccaacacggtgaaaccccgtcttttctaaaaatacaaaaattagccgggtgtggtggcaggtgcctgtaatcccagctgcttgggaggtggaggcaggagaatctcctgaacctgggagctggaggttgcagtgagccgagattacaccattgcactccagcctgggtgacagagggggactccgtctcaaaaaacaaacagacaaacaaacaaacaaaaaacaacaaaaaaaaactgaattcaaagtccaatgcttggagcttctcagtgttaggctgtttaatattatttttattattattagtgtttccaaatagcagaatatgctgccttgggtgggtaagggcagaaatggaaaggggcaggtgtggcaggagggcttcacctaactagctggggtgagagatgagaccaggccttcaagtgcagtctggtcctgcctatcagaggctggtcccgggctataaagaaggaatcagccccatggagttctgatttaattagcttggtgatattgccctatcgatcactcatttcaagtctgccaaccaggggaagtgtggtttgcccatcaccctctcacttacagaagccgacatcgacttgtttattcaagcccagctggggagcccttcagagcccctccctcccccagcacatatttgagtttggataaatctctctcttctgcagactgctcagccagcccttcttcctgcttcctgggcttctaaggccctctccccatctcttcttttccaattgaattagctttaatatttttttgatggaaagagtatttgctttatctctgctgctaaatgtcctaattgtttccttcatcttgggtaatacctcgttaatttcgcggctgcctgcctgcctcttccagaacagccatagccttcagggtttcttttttccttttctttttttttcttttttctttctttctttctttcttttttttttcctgcagctgatgatgctgagttggaggggatccagtcacattggggctctcttgggttcttctctctctcaccctccctggttatctgtctctccccttctcctctgcctttctctctgcctctttcccttcttcctcctttcacctcccttctcgcagcttctcctcctttcctggaaagataattcagactttcagactagcttcgacatgagaacctggtaggaaaagagatgattccatgagaacccagagagcccagctgggatctaggtgcactctaactgtccccaccatggcctgcctgtcctgctttatttcctccactggaaccattaatttagggttttcctcaaatacgtgacactgaatgtaaactccaggcacctgtggtcatgggaggggaagagaagggcctctgatcaaatacaccgaggaatgctgtgcaatgtagggagctcatgaacaatcaaacttactgggtaattaaaggccctgagaaggcccgcagtaatgaaacctattgaatcttgtttcatccaaagatttctgaacttaatcacttttttaagtgtggcatggaacttacttgggaagtatcagcttcatctaacaatgttccttccctactcttccttctttgccaatgaaaagtttatgttttaagaaaagacacttttcagatgccccagttcctcaaggaagaactaatgacctctcctgtgtacccagaagagatgagtttgagactctgttggagaattggcatggacatcttttcctcagagcttgtctgtggctctgcattccttaaaggcaggtgctacgggggagaagatggcctggcagtcagatacaagttcaaatcccagatccaccacttggtggctgagcttccctggcctgtcactaaaattctctgtgacttagtttgcttgcctgtcaaataggataatcacacccatatccccagagtctgggagagtttattgagataacacaaatgaaatgtggggctcctgggaggagctcggtgcattctggtgtgtgtgtttgtttactgaaataaattttatgtaatataaaattaaccatttacagtctgcaatgcagtagcatttagtgccttcacaatggtggcaaccatcatctctatccagttctgactttttcatcaaccctaaaggaaatcccggcagtatgagtcaccacgtctctcccccagcgcctggcaaccaccaagctgctttctgtctctgtagatttgcccattccgaatattttatatcaatggaattgtacaatatacagtcttttgtgtctggcttcttagcataatgttttctaaggctcatcaatgttgtagcgtgtatcagaactttattcctttatgtgtttcaataatattccattgtatggatatggcacattttatttatccattcatcactcagtacattctccagtggaattatccaaggcactcacttctctcctttggctaaagggtgaagctttactcaaatccacttgtagaaaccacactagagttagggtttaaaaattaacaccagatagtggggtgtggtttgtggaactctggactggaagtcaggagaccgggactttgtttctgagtttgctgtgtgactttgagaatctcctttcccctctgtgggcctcagtcttcccacctgtaaaatggaactgggtcaagatgattttctgattactttctgctccaacatcccatgattttagttgtctcttgagtttccaacagggtgcaaatacctggagagaaactcttattagggatatcagaaggctgttttgtcatattcctgattcacatatcaggcctaggggtgacataggcaaaggggagtcagtgtttccatttgtaaaatcaggagggaagtgtggacccaggcttcagctttacgcatctgtgaattacacactcactgcaatggagctggcatttctgcagctcctcctgatcagtgtgctggtgggactgtgattactcaaacttggttttaaaacatcaacatccatgcataggaccctctgccaacagcctggtcacctgcactccaggtaaaggttctattgaattccaatgtggtatctgcaagcgctcagtatctggattttctcattggtagctcctcattgagacatattttgacaaattaaggatgtctgtgtttatttctgttaaaatggtgccctgtttgctattggtgagcaggatctaattagaaattaatgaacatgctagcatggcagccccaccactgtcagcagtgattttaagagctacatggtcaatagcagtggagggaagagcttggcgttctggggaatccactgcacttgctctctgagttcagcgatcaggcctaggggagggagactcctacagctgggtcttagaggaagggtctactggccagaagtcatctgtgggcaaacaggtcaccatgaggaaatcacacatctcctgggtgctctgagtctaatagcaatggcactgggcaaattacaaaaggtagcgtcagcttacagggcagactccatgagggcaagatccgcattgtattgtttattttgtttatgttatctatccagcactagcacagggcttcacccacggtgggtgcttaatgaatatttgtaacttgccctaaagccatgatgctggcatgtagcaattgtgggatttgaatttaggcaaccttagactagaagatatgtgcttccttcctgacacaatctttcttgttctgcacataccacatggtgctgtcattgtcaggccatttgtccatctcctttcctgggccatgaattgtttaagtgaaggaggagtgttttttttcaccttcatatttctgatccctagcacagggtcagacctacagtaggtgttcaataaacgcttgtcacattgagttggatgagatctcagtgagccacaggaaatttttctgcagcagaacagactagagttttagactgagacctggtactcttgcatatcccagcacccagccctgagcctgatatgtatcagagcttaatatttggggttaaactgaaatgtatgtatcccaccccattcagccccaaaagaatggccactttgcattcaagcgcagtgttgtcattcaagttacgtttcctgagggccagttataattaggacatgttcccgtcatctgcatttttaaaataagtgaatggaaactcccagggggtgacttagattgggttcccaggaaacagattctgagatggaaatttgtatgtggaatgtttattggggagtgcgcttgggagatgtacctggaaaaagggaggcaaggaaggaaagaaggaagaagagagagggagggagggagggagagaaaggaggaggaagggaagaagggaaggattgggcagagggttgatccaccatgcagttgctactgagatcttagtggatcatacagagagctctggagtgggaatagaacttcagagtcatctcaagttgagagatgagagctgagtccttgtgtatccatcttagtccctgggaagagatatgaccttgggtggtgcaattcctcaccaccaagggcatcacagtgagggatgcagctataagccatcaggagccaaaattctcagcagctgaggatagcagggtgtgtgtgccagccctgaagagggtatctctataggtggattgctatagtaactagagggatagtgggtccctgtgtccctcaccttctaagtgacagacccgagagttaaccctggtttctgaaacctgggtatttgtttactacatcaatggactcaccctacagtaacgatacaaggcacacctgcccctattatacaaaagatcacaaaccactgatttgggagattggaggagaagataatggctggtaggtatctggtctgggcaatgaccattgtcaactaaaggacaaaggcaagacaatgctgaactgtgatcagaacaagtgggaggattgccatttcataggcatgactagaactcaaacttccaagactcttatcacagtgcttgctctactgtgtcacaccttatggaaaggggaggacaactaataattattttaaatccaccatgtgccaggctccttgtgataagggctgccttcttctccttctttgcttgctcctcctcctcctctctctcctcctctttctcttttttcttttcttttcaccctcatccatcttctctggtattccttttctcattgaatcctcacaacaaccctgggagacagcactaatgtatgcccagtttacagatggggacactaaagactctgagaattaaaatggcatgccccaggtcacagcggtggtaagcagagaataaggaagacagaaagacctcaaagcaaccttccctacccatgagttcaacattaagagtttggttttggaattttaagttaaagtgcctgtagattttcagacatgttacaattcatccctgggggaggtcatacagatcccacaaccacaaagtggctttctgtggatatagtcattgttcctcagacccagttccaaccagtgatgatcaagcgctcatcaggggagtggcagctagtgggatagtccaacggatgctcacattgggccggtagagcatcattagagatgctctgcagcttgacccacctgtctttgtgacgaagacttgctttattttgtttatctcccttccctgacatgcaaaatattcccagattaaattgcagaggaaacacacagcttcatggcatccttatctagggaaactctgggtttctgacagccatttacctagtggggtgccagtgacattaggaaggatggagtcggcgggggcaatggaatatctccaatcacatgaggcgtgaggtctacctgaaggggtggctgagaaaacctcttataagaactctcttcccttctctttgcccttgcgattcccaatgatactgaaggtttctgcaaaacattctacttgaaatgtaccaaaaacaagagggttggagagaggtgcagtctcatgttgggatgtcagatgcatcatgtagtaggggttcaataattatttgttaaataaatgaataaaccaggtaccagggacgatctagacacatgcatacattagttatttttttcaaagcactctttggggataggtattatcctcatttctgagaggaggaaggcagggatgtagcagcagaggctgtaatagatgctgccagggatctgcccctccccctttgacactcttgttgacacaaacacctttgactctcagcgtgggagctttctactggccacagggccatgcttagccccttcatgaaacatgtcagaagtgcttgagagttaatggccttggggcagttctcaatcacagatgggagttggtgtactaatatcccagtctcccaggcaggaaaactgaaccacatgctctatgctgtctcccagagtcctccagtgggattgagctacagttgcccactgtggttatttgcttggtcatctactctgcattgactttcttcccttccctgtctcacttccctactcatatatctgtgtttcttgggatcatcactcatgtcaactactacaactagaatccttctctccaagtgcacttctagtggaagccgaaccacaagagggactcagagaggtagagaagtgctcctgtgtccacagcaggtgggaagctgaacgaagatttgaacttgtgccttgcaccaatgcctgccctctgtctagtattgcttcttcacccaagtactcattttaatctccatgaaaccatttagaaaacaatagccatcatgtatcaagtgctcagggtatatcagatacagaactgagcactgtacatactttacctcaaggtttgtccaacttggtcatgagcacaataccttcagtcccaatgtgctcacctaccacctgttcgtatgacctttttaataaaattctccaaataaatccagttactttttaaataaacaaaataacttttcatgggaatattagttttcctccgtgaatagcaaagtgaaatcactttctgtaagtacaagctaatttgtaaactaaagacttaaattaagtataaaatgtttaattgtcttcctatttaaaatttattgtatatctttggcagtttatggctcacactttggtcaactctgtaccatatctatgaggtaggcacctttatctttcccgttttttgaagaaagaaaactgaggctctgaaggtgaattgacccatctggaaaaaatggcacagcagggaattgagcctagcttcagtcaatagaaagctcttagccactgaacccatagaatcaaggagacaatgaacttcccatgagttgagtagcgtctgcattacagtatcatgttgaaaacagcaacatttcttccatttctctttttttcctcattaaaaaggcaacgatgcttgtttttatgggaattgaaaaagaacatatcaatggaagcgataagacttaatgcttaagccccccttctttggccgtttctgtgtcaatgtctttgatctttgaaagccatccctgagggaacattattcttgaccttctcattaccacattcaacatggtgatcctggcatacagcagcactgagcttgtttacataaccatactcagaatttcccatgagcactttggaaggttccccaccattgcctcatgttcccttcccaccaggtcttccctcctcttcttgagaactactacaactagaatccttctctccaagtgcacttggagagtgcccaatggcccccttatgctttaatatgctgttgcagaaaggcagagagtaggagaagcccagcaactatctgtatggatgggtcacttttaactctgacactggacacgtgcagaagttctcagaatttattaggttaaaccagcatttcttaaaatgagactcctgggtaaacttgagatgctttcaggagataccgtagtgaaaaactatttttattataatgttaagatatcatttgttctgtctctcattttcctatgagtacacaacagagttttccaacaaatgctattatttgctatgtgccaattactttctagaggctatgtgacatggaatgatgtcatcgcttcgacaattaatggaagatgggcttgtatatcttgtatattttcatgttttaaatatttcttaattttaatttcgaatatggtaaatatctagagctataccccacttacacaaatgctttgaggagtgcttaacaattcttaagaggataagagggtcctgagaccagaaagttaaaccgtatgaagttgatgatatttgacaacgtttaacctataaagatggcagcttcatgtcagcctgatatttacacaaggttgttaaaaaacccacacatgccttttccttggcttgagcagtctctcttcccctcctaagtaagctccttcttgtgtttcagagttcatcacaactttcgcctcctccaggaagtggtctctgagccctctggccatgtgcctctccttcgatgcactcattgtggttgaaagtttacatttgtctatctggtactttcactaatgatgtctgactcccacccacactacgagcttcctgtgtaccaggaccataagtgattttgttcatcagtggaccctcaaacccacagagcaagtattaacagagggcattgtttgttaatccatccatccacccatccattcatccatccatcagtccatctgtccgtctatccactaatctatccatccatccatccatccatctatcccctaatctatctatccattcatccatctgtccatccatccatccatccatccctccatccacccatccttctatcccctaatctatctatccattcatccatctatccatccatccatccatccatccatccatttgtccatctatccattaatccatctatccatccatccatccacccatccattcatctatccattcagtcatctaacatttattaacataagctgagtgcccagctctggacttggcagtttacttaacttcctatttaatcttgagagatatcaaagagaaattactctggacatttggtgaaaacagcaagatacattttattcaagctactgcaatagaggagagtgacttaagcatataactgagctcaactctgaatctagtaagggcatctggggatttatagccaatgggcaggatgagagaataagtggatggaaaatgacaaagaggaacttgattagacataagagtggggagattcttgttaaacttgcttagcaggattttttttttgctaaacctgagttttacaggccaaggatggcaggtcaaggaaaaggcctagttgggaagaggtcttggaagagactgactaatgtttggtaaaggtgggagtccttgtcagggggaggttcagttttctagataaataaactgaggctcagagatgatctcaggctgaaaagtggtagagcatgttcaaactagatctgaaagatctagttttgtactctttccacagtccttagtgcccctctgcagagggaaggaatcctagaagacttctgagaagtggtgacttttcagctagacactaactcacaaagtatgatacagtgtcttcattgggccctcttctcagccttactgtcatctatgtactccatcagtattctttaggtaggacgctagaagctgaggttacagagaaatattagacaaataggagcaaagaaatgaataaacaagtaaacacaactgtaactgtgagataccacagtgtggtatgaaaaaggaaggatgataataggttgctatgagaaaaggaaaaaaaaaactaggttgggagggaacatctattttagaaattctcaagtaagtgatttctctatcagagcctcttgggaaaagtcctgctttggggaaaatttttaagagaggattgaaggcacaatttctttatcaaaaatgagctgtcacattctctgattagatattggtgcatctcttttggctgtagcgttgacaataatcactaccaaatgctattacttctatgtgctaagaacctgaatgtatttattccttgaatcctgacagtcaccctataaggcaggtacaactattggctccactgtacagatgcagaaactgagactcagagctgcattgaagcccagatctgaggccagaatccatgctcttttccactacattatctatggaggtccaagggcttccttctttcccagctggaggaggtagttagtgacggccccagaggatgcacatttgtgtgtgtgtgtgttggggttggggagggagtcatggcagctgatcaccagactttaaacactcatgatccttaggaaagggaagctgagttgcatggtggtcacaatcagacacatttgagtcagcagacatgggtattctccctcctctgcctgtcctagctatgtgaccatgatgacttcttcacctggcacctcagtttccttctgtgttaaatgggattaatacttcttcatgaaagttaaatgaagcagcacaagcccaggatcaaggatgcaccccattctttctctcccttccttcttcccccacagctccgcagtaaggttattggggcacttctaatttgtgtttcttaagtgtgggatatttggctccaaagccaaagccgggttcaccagcttccaatttggcctcttccttacccctaagaggggctgtttgactacaggccaatgctttgttaataagaatgcagtgtgcctgtcacctttaaagcactacacattctgaaaagttcctccaagtctgggagccattaatcatcctctgtaattaaataacacagcaacctgtaattagggcattgatttgttggtttaattgtgtactcttgggctcccctctagcctgtgagctccatgagggcaagaattacatccattttttattcacagctgggtccctagtgccttccccagtgcctggtactcagaaggctctcaataaatgttggttgaataaagaagtgggtggatataggggctcatggttcagtgtctcccaggcattatactaagttcaagagaggggttggcagttagcaaggaaagtcagtcataataatgattctttgtatttgggctgtgcttcatagtttagataacactcaataccaatgtgtgctgatgatgaaaatgatgatggtgatggagataatggtgatgtttgatgatggcgatggtgatgataaggatggtaatgatggcaatggtattggtgataatagcaatgatgacaataatagtagtgatggtgataatgatggtgatgatgatggtggtgataatggtgatgataatagttaggatgataatggttagaataatgatgatgatgatagtgttgataataatggtgatgacaatgaaggtgctgatggcaatggtgatgatggtgatgatgacaataatggtgataatggtgatgatggtaatgatgatgatgatgacatcatgatgatagtgatgatgatgatgatggtggcgatgatgatggctgatgatgacaatggtgatgatgataatgatgataccatttcttgaattttgttatgtaccaggtattttatatgcatcatcatcacataattatcacaataactctatgtttattatttccatttcagttacaaagaaacaagactcaaagtgtttgctcaaagcaatccagcagataaggggcagagttgagacacaaactcacacctgtctaactttgctctcaaccatgaaactctaatgcctttctttgaccatgatctcaattaatcctgtcaagcatataataagacagtcaccactgtcacatttttgcagatgaggaagaacttcagagagagaagagacctggctaaggtcacacagatcaagagggccagggtgatgactagaatcctatttttctgatttccaacgtggagctttttttactacaggacaaaacgcaggagatttgggggatctgaaaacagaagataacacagaggcaagatacttggaacctaattctggcattgcctcttactagccatatgaacttgggcatatcattgaaactcaattttctcatccataaaatagccattttaagaggattttactgagatcataggtatgggaataacttctaagacaaagagctctatgctttcaatattgtcaattccaatgccttgataagtcaacatatccatgcctttgacagtccagtgacatttttgagtagtcagtttctctgctaaaattagtcacctctaaaatccttctggctctgacattctatggcacccaagtagtaacataaaatgctttattcaaaaaatggaaaagagacatgatgtccaaatgccagacttcaatgttggtaatattgataagaaaaggcccattactcactatgttctagtcacctggctcatcttcccatccagaaaacatttcattttcagtctcatcacaaggcctttgctctgggtgttttcttgcctggaacaagctccccattcgattcagtaggatgtcagctcagacatcgtctccacagagaagccttcttacccaccgctatctaaagaagtgctacccactccatcccccatcaccactctttcccaacccgttgttctgttgttttttcagcattcaccaaaccagctggaattacctagtcagtatattctattctcttctctgtctccagcatgaaaacatgtgtctcacaaaagtgggactggtatccccaatgcctgaataagtgaccagcaaaaaaataagcatttaataaatattagtgtaataaagtactgaataaatgaattttatcccatgttacttgggcatgcctgtgttgtgggtagattctgactccctcaatctcaggagatgccacatcccatttccagtcccctgagtcatcgagtgtcatgcctgataaatagccatcattgtgggaaggcaccagatcttatttctcagctggagctgacaccagtacctcctgccaaatgtgggcgaggtaagctgagtccacaaccggaagggccaggaggagatgggcactccagtccatgctgtttcaaaaaaaaagtccagttttcttgtttctatccacttgtgaaatctgctgtcacccttttgtaaggatgtctgagaaagtgcaaaaccagatttcctggatccagggatgcaatagtttgtgcaattataacccaacacatcacagaagtcagattggcgctcgctgcttgcataattcatcactcattttcttgtcatggcttaagacctttcatatctggtagacaaaaaaaattaagtttacattgctcaattaaaaattcagaagtttaagggcaggaaaaaaggagaatgtgagttgtatcatcgttaaatagacagatagaaataaagcactggaagaggaaacgtggaaaagggggcaaggaagagacaatggaaaaacgtgaaccttgttggtaacttgtcattctcagattaagaatgtcagtggagacttcattaattccttcttcctaatggtcaaaattcagggactgtggcaggatgggaagtgagaagctttgggaggagggttttctaatcctccctccctctctctctccttccctccttccctttgtctctcttctttctccctctcttcattcctcttttccaaaattttatttaagcccctattctttaccagccatactgaaaagccctaaggatataaagtgaatgaatcagaatcttttattgacgagggacctgcaggttgtttggagaaaacacaattctagcccagagtgattagtgatgatataggggaagcagacaggttgtgggagcccaaaagggatggctgatccagccagggaatggccagggaagcttctaagagaaagcaatgcttgaatggttcctctttttttttagacagagtcttgctctgttgcccaggctggagtgcagtggcgccatctcggctcactgcaagctccgcctcctgggttcacgccattctcctgcctcagcctcccaagtagctgggactacaggcgccgccaccacgcctggataatttttttgtatttttagtagagacggggtttcactgtgttagccaggatggtctcgatctcctgacctcatgatctgccccccttggcctcccaaagtgctgggattacaggcgtgagccactgcttctagcccttgatttggtccttaaagaaggcatgagtattaggtgggtgatggataggggatagggtgagggatggcattctgtgtaggagtgaacaacatgtgcagaggcccaaaggcaggataaaatatggtgtgtttgtgtggagggtggagattgggctgggtggagatggggttagagtgaggcagcgctcaggtcattaagaaccttgtgggctagattaagaagcttctacttagctcccactagatcgaaaggttccttgaaggcagggactatgtcttttctattctttggccagtgacaacccattccctggcatatgatctggcacaaaacaggactcaacgagtgtttgttgactgactttattatttcagaagtcatagggagccattgaagaatcttgagcacaggagcaacataatcatgtctgaacccttgaaagatctgtctggatggacaatgggtgaaaatgacttggaggaggaagagaggagctggccagggccctaggcttggagactgtagtcaagactattaatggtcacaactatttaatctcctcgtcttccttttggtgatagaatcccctgaagcacagggcacagagctgcctagctagagactgcatttcccagcctcccttgcaacgaggtgtggccatgtgactaggttctagcgaatgaaatgtgactggatgtgataggtgtgtgtttaactttcacacttcctccttgaaagggagctacctgtcccatttccctcgttttttcctgtcttggatatagtcagaatgatggggaatagtttcaaccacggagataaggatcattctctagggcagggattggcaaactttgcttgtgaacctgtacctcctggccatttgtttctgtaaataaagtttgattgaaacacagccacatgcattcatttacctattgtccatggctgctttttgctacagaggcagagttgaatggttgtgacagaaatgtttatggctctctaagtctaaaatattgactatttggacccactgtggtggctcatgcctataatcccagcactttgggaggttaaggtggtggctcacttgactgtaggagtttgagaccaacctgggcaacatagcaaaacttcgtccatatgaaaaatcaatcaggcatggtggcatacacctatagtcccagctactcaggaggctgaggttggaggatcacctgagcctgggaggttgaggctgcagtgagccgtgattatgccactgcattcccgcctgggtgacagagtgagaccctgtctcaaaaaataaaatattgactatttgatgctttacagagagtttgtcaatcctgttttaggggatggcagagctacaaggtggtagaaacctgggtcccgggatggctttgtggagcagagacacctacctactttaacagcccatttacatcaagagtgataaatgagggaaaataaatgtagatgttcggttctctgttgtggaggcagctcagttctatacttaagtattcatcaaatagttattgagtctgttgaattggggcagatggaagatggagtgatctgaactagggcagagttgatgaggaggagagaagtgagtggagtccagagacactggggaactcagtgggcaaatctggtgtctgtctggaggaagaagtgatggaagaaccagaaatgactcccaggctaatgaggtgactgcaggggacaggggagcaggttgggaaaactgaactcagttttgtttatatgatggttgaggtatctgtgagtcccaatgggtctgggaggcggttggctttcaggggaggatttggagaagtgacatagcgtgtatgaatgggatagagcccactgcttggtaaggtgatgctagcaccagagtttgagctagaaaagtctctaactatcactcagccatttccccatggtatccctaaaaaggctgaggcttagaaatgatagcaagctcttccaaagccgcacagaggggtgttggcaaagtccaggcatcctgagtctgggtctcgtactgactcgcctccttcacagacatccacatgccaggtccgctgccaggcatagggttacagtggaaagccaaacacacatggtcactaccaagtgaatgatgacacgccaactgtaagaggcacccgatttcagagatgtggagacttgccagatgtgcatcttaggaaaatgagctatggtgattaagagcagctactatttcctgagcatatctcaccatgggctgagagaagtgctttttatgtataatcatagtcagttctcacagcacaaaggtaggtgttactactagcctcactttgaggatgagaaaaagttaggttcagagatgccatctctagtcaaaggtcacacagcaagaaaattgccagagttgctcattcatgaattcatacatccattcagtaaatatttattgagaacctactaagtgacaagtgccattctagcatctagatttatagcaagaaagaaaattgatcaagttactgctctcctggggtttggtttctagtagtggggggaggaaaggtaaataaataaataagtaaataagtaatgtatcagataacttcaagttctgaaaagaagaacaacaaacataaaagaggttgagaaataaaggggtggtgctgtttcacagaagatggccacaaaggactccttaataaagtgattttggctgggcgcagtggctcaggcctgtaatcgcagtactttgggaggccgaggtgggcagatcacttgaggtcaggaatttgagaccagcctggccagatggcgaaacctcatctctacttaaaaaaaaaaaaaaatacacacacaaaaaaattagctgggcatggtggcatatgcctgtaatcccagctacttgggaagctgaggcaggagaatcgcttgaacccaggaggcagaggttgcagtgagctgagatcatgccactgcactccagcctgggtaacagagcaagactctgtctcaaaaaaaaaaaaaaaacaataaacataaaaaattaataaagtgactttgagcagaaacctggatcaagtgaggatggggtaagccaagtagagatgcttcagcaatgggaacaagtacaaaggtcttggggtgggactgaaactcaggtctatctgtggttaacaccttttcccccactctgctgtattcaattcaacatgtactttactgagcatgtgctatgtggcagcctgaatcagaggctggataagataatgaattctgccagacccaattcctgccctcagtgtttttcacaaagtaacaggggagatgcacacatccagtggacattctgtgaggaccccaggcagatacagaataggtgaaataaaataggaatgggagcttgtctggacaaggaagaacttgccctggagttcgaaggcagttggatttttttttaaagctcctcttagtagtataaatacaccaaacaagtgcacggcttgatacatttcacaagatgaatgcccccagcaccctcatcatgaaacagagtatggcaggctccccagaagttcctgaagactccttccagtgactcccaggtaacccttagcccgactcctagcaccacagattattttttcctgccttttatgtctggtttctcttgcttaagactatgttcgtgagatccatccatgttgtgtgtagctgtacctcatgcattctcattactatccagcaccccagtgtgtggatacaccataatttatttgcccattctgctgttgctggagaattgagttgtttccgtttttggccatggtgggttgtgctgctatgacattctagtgcatgtctttggaggaacatatgtacacatttctgttggatatgacctaagagtaagctttctgggtcatgcgctgtgcatatgctgagcttcagtagactctgccaagcaattttccaaaatggttctaccaattaacactcccaccagaagtgtatgagcatttgagcagtgtatcctcaataacatttggtattttctgtcattttcattttacttcatttttattcttttgggagtgagatggtattacattgtagttttaatttgcattgccttgatgactaatgcagctgaacatgttttcatggttactggccgtttgataattttcttttggtgcagtacctgttcaagtcttttgcctatttttattctattgggtgctctaccattttcttattggttataggtgattatacattctggatacaagtccttggttgaagatcctattgcaaatatcttctctgctctgtgggtttctctctcattctcctaatgaagacatttgatggatagatattctcacttttaatatagtacactttatctctcttttttcttacagcagaatagaattttctcaaggatgtttaaacgcagaaagcagtcttttccagtggagggaggggtgggaaggtgggaaagtcagggtcttggaggacataggtgtgacctgaccctcagagatgtgtaaaaatctgggaggtggggaaggctgcagaagttttgggggaccaatcatggaggcttccttaaagctatgctgtgaagttggacttccttcctgaaaccgacagaggactgaagttttgagcaggggttggcaagaccacagctgaggttaggaatgttaatcccacagtgaatgcctgatagagtaaagtggagttggggagggtccagcctggaaagacttggggcagccttatagagagggcttgacattctttctccccacaggaggatagccagggggtggagttggggacatatttatggatgatgtatccttaaggataatgtcacagccctctctggccctgacttagtatagagctgtttttctgctgttatgtagaagctcagagaataagcagatgcatcagaggatcacaggtcaatcctttatccatcagccctcagagctttggaggagatggggcaagcttgcctgtcttatgtctgggaagagttctctgaggtggaagacagggtggaggcctgggaagaactggggggcatgggcaggagacctggattataagcttggttctacttccgtccattgacatatgacctcggggaagtttcttcccctctctgggcctgagttcccttatccacaaaaagggttgtaagactcacatgaatgcatggacatgaaatggtctgtgactaacacttcacaaatgtaatgaattactgtgtcttccccttcctctctccgcctccaacccaggaacctggggatcagagaactttccatttatcctgctaatgattatgcctgcactggtctatctacagggactgtattactagacctaacccagaattaaaggtatttgtcacctaggcttccttgcttaactgagttacgaggagttcccaccaataccaacctcctctgtctgaaatctaagcatcttacaacccagatagggacatggaaattatgtattttcatttgtaatgtattctcagtttctctaaaaatatttaaggtgactggcaagataataataactatatccttaggtcagacactatgctggtcatcctggtaggagacacgcttggagttgtgcacagacaggatgctaccagcagaggcatgtagtcggaatagagcaggagctcagagagcctgtggtggggagttgcatgtgtcaacctggtgaggctatcgcacccagtcaaccccacactgatctaggtgttgctctaaaggcattttgtagatatggttaatatctaccatcagttgactttagataaggagattatcctgaataatccagccctattcaatcagttaaaaggcctgaagagtggaactgaggtttctctgaggaagaagaaattctgtctgaaaactgcagcatcagttcctccctgagcacttccagcctgctcttctgtcctgcagattttggatttgttagccccacaattccgtgagcagataccttaaaataagtatcttactgtatctctctatctctatctctctctatgtacctctatctctacctctatttccttttctatttctatcatcttcatctccatctctatctctatcatctccatctccaattcatctccatctctatctccatctccatctctatcatctccatctctatctctattatctatgtctccaactctgtcatctccatctccatatctatctatatctttatctctgttatctccatctttatctccgtctccatctctgtcttcatctctatctctatgtgtgcatctacatctctgtctacatatcctattggttctgtttctctggaaacgctccctgccaggcacagagccctaagaaagtacttaaagccaatgtcggtgggagcagtggatgatgaagaccagctctctggccttagcatcttctattttctctcctttactctgctctagcctcaaagaccttctttctagtccttaaacatgtcaatcacattctagctgtcagaccttggcactgactcttccctccactcagagagctcttccccacaacctgagcatctactttatctaggtctctgtgtagatgccaccttgtagagaggctttccccgatgtctctaatctaaaatatctactgccatcatcctctttttactcagatatttttcttccccgtggttgtcactgttggctatttcgtatctttcttttaattgtctactttgcccactggaataggagctccatgagagcagagacatcacttattctttcctatgtcctagtccttatcacagtgcctggcacagagtggcactcaatgggtccaaaattgtggtagattttgaatgctgggctaagtaactgtaaggagttgaaaccagcttcaccaactgatctccttctgacagctgtggactcccagagggacggcatggagggaacttgcaaagagacgccagcacgaaacagcttggaggtacttgacaattttcccttatctccaatccacgttgcctggccaagttgttcatgaaggaggccttatgatgcatctcaaaaaagcaaccccagcctatcaatcactcagcaaattttggaaggaaaaacagatatcaaaaacgaaagtgcacagtggtaacatatgatatcagatccgtcattctttacagcaacatggatgatgacgtttgggaaacagcagttgtacccaaaagatagacaggcagttttgacatatcttgccagagaaggatcacccacctcatcccggtatccccaccttcccaacccgatcacaaagaatgacagaattacaaacaatcaggcagatagcagaagctgcggacatttgggggtgggtagtaaccacaagatgaagttccagggaaccaggtatcagcatattctcagtctaggcaagggggtggctgcctacaaggtgagatttggtaggctctgggaggactcacttgcctccaataatgctttcagtggtctgtccagggtgctgaattggcaccgctcagggttaattagtgttggcaaggagtctaacaggtgatggttatcagccattggctcctttgtgagagtgagtttattgtgagctaataaagctggagtagggagtagatatctagaaattacaatcataagcttacaaaggccagttgataacataagcaagttataaggcaatagggagtggtggggattgtggttaagttgagagtacaggctccacctaaaaagggaagccaccacccagtttcagctgtttgaggccaggtggaatgtgagactggcgattttaatcataatttataggaggagctatacgcctcttttatgtgagatctcttggttttaaatcctggcaactaattttaatgtgttctaggctaactccttatcttaaggcgaggagatccaggcccagagaggggaagagacttgctcatagcagctcagaaagttggcttcagggtagggactggaatcccattgactgactcccagtttagtgctctttcctctttactccagcatgctttcctcttcaacaggagaagtctttcctctctgacccctaaacttagaaaatacgagtgaagggaagaaacagagttggggagatgtctgagcaaaccaattctaaattttacaagagcacaagatagccacaattatttcatcacactctagctcagctgaagctccaggctgagaggttagaggctggagaatgaggatattaggattgatggagcagtaggctttgcaaagatatgtgcccctcctgggccatctgcagagttctgggacatccccttgggagcacctctgagctcaaagccagatgctcccccttttccttttatcctaaccaggtttcacaagaacagatcctattgatccccagtagtagcagattctctttgtaggagttctctgggcaagaaaaatcaggcagaccatagggaataatcagccaggaggtatctggtctagccacctaccctacctcaatcccatcctccatctactccgaggcttggggcccctgagccctcatccccaaaagctggaggaatctttcttccttgacaatgctggggacagagtctgcattagacaaatcaacaaggccatctcagaagagaccaaataggaaataagaggccccattgcctaatgggacttatcaattatgatctagggccatatttctttgaggggtgattgtttcacggagtctgacatctcatatagctttaaattactcacaaccgggatggcttacaagatagcagtaaaatcaggagaggattgggcaatgtaattatagtatggaaatgatgttgatcactcaagcagggagcagaccttgaatagaaaaccctgctctgtctccccaccccctgccttccacagctcccactggagctttagccaccacatccaggaaaccgggaggtaacctccttcctacttggaagctggaaggtggccaggtccctatgtagagtataatgaggtgtggggctggtgtggaccaagggatcaggaccaagggcagatcccatgggacccattatcaggttaatgggaaaatctgagtcggcagggctaacccattacgctagtttacgaaggtaacaatttcccaaacggttaatatgtgcgaagaactatattaggatctgaaattttatacatatccttccttcctccctccttccctttcttccttcctttctcccacccaccctttctttcatccattcatctatccattatccatccactctgaaatacttcatttcatttttaattcccctcctccttccttcctttatcccgcccatccttcctttctttcatccattcatccattcatgtatccatcatccacccatctgttatgaaactattaaatccatcctttctttcttcctccctctctcccttccttccttccttccttttatctactcatttactgagtaccacctccatgccagaaaatatgtaaggctttcaaggatacagagatggattatttcaactattcagtgagcatatactatgtgcaaacattgtgctagcatccagataaggaaaaactcattattcctattattcctcaaatacttacggataattgacaagtttgtaggactactcactgctcatcaaatcaatttcttttttttcctgagcacacagtttaagctacatctcccagccttccctgcagtgaggtctggccatgtgactgaattctaaccaaagaaacttgagcagaagtgatgtgggctagtccctggcttagccacaaaatcatcctactctttctccaacctgccagctgggcttcagcacccagtgtgaccctagaaggccacttgtcgaaacttgcaggatcatcaggagcctgggttcttgaatgaacaagtggaacagagcttctctctcactcctgatcctctgctgccctgaacctgcattgcatcatcaggtaaataagataaacctgtgctttttgggctgaaggggcatgggtattgtcagttgcagtagtcagctacactctataccaggtgccgggaatgtaaacatacatgcaaacctttccttggcacctactgtggtccaggcagcatactgagtgcccggaatgtggagcacagctcattcattcaaacacttattgttctaggctctggggctatggagacagataaatagcaattaattggtcattttcacaaacattcattaggtaattagtatgtcctagtcttggagttaaacactgggggcacagaggacaatttattcaatcatggattaagtttcctaccacgtgctggacactaggttaagcattagggaatcgaagatagacaagactcctgtcctcaaggcattcaccatttggtggaagagccacatcacatcctggtggtgtaagtacagaaagtgttcaaatagaactttttatgaggttgtgtggtaacccaggaaatgatctctacttggagctgagaaagaagaggtgggagcagggaagatttcaataagtggtggttttatatctgggcagataataggtggaagggaaatccaggcagaggacacagcatgtactaaggaggtgtgtcctgggatcaatgagttctgcgtgaccggagctcagagacaggtggcaaggacagaagcaggtgaacagggtggcagcctgactccagggcagatgctcttctctttctccctgcagtgtttgtgtgattggagctagcaggggtcagaggctaagactgactccacctctggctgaggtgggagtagacattctgtcttatgcctctcccacttccaaggacggcggctgttttgtttctcctttttaaacaataccttttacgggagcgcgagctcttaatgttatcccactaatattatctccattttatgaatgagcaaactgattatcagagaggtaaattactcactcaaatcacacagctgtctgatcccagggttggcacttaaatgtccaagtgagatcacattcacgatgtgctcgtggcccttgcagagtaagaaacaagtttccagccccaacaaagatgcagaggctctgaaagtctctgggggtgattgactatatttggcagaggccaaggagcttctcctcccaaacactaaacagaactggctccacatggagctggtgtgtgtgtgtgtgtatgtgcgtgcagttaggggtataagggtgggggagtcctagctgagccaggaccagcccgagctatgccgggaaggaataaatctctctctgagccaacattaatataagcttggcaggttctgggcaggcccccggttgattatgccaatggacactggggaggggaagattaagctgccggagggtggtgtgaatgcatatcacacagggtaatgccttgaaaatatatagcatctaagcaggcagacaactgaaggcagggtaaaggaggatggtgggaggtgggggatggcatctgtttgcaattatgatgaccagaacccactgaacaaggctgaggaataagatacctagggtacctactttaagtgagttgcaggagagccaattctaaattcattacatgtttactgggcacctactcagtgccaggcactaggggtaaaggagtgaatagccagacacagccctgccctcatggaactcatagacctaagtaagccatcatgccaattggatacatgtaactgcaaaatgtgcattaaggaagagggcagagaacagtgagggcctgtagcagcttaggtggagatcagggaggtctacctggaagagatgacatttgaaaggagagctggccgggtgcggtggctcaggcctgtaatcccagcattttgggaggccaaggtgggtggatcacttgaggtcaggagttcaagaccagcctggccaacatggtgaaaccctgtctctactaaaaatacaaaaaattagctgggcgtggtggcaggcgcctgttaagcccagctacttgggagactgaggcagaagaatcgcttgaacccagtaggcagaggttgcagtgagtcgagatcacaccactgcactccagcctgggcaacagaatgagactccgtctaaaaaaaaaaaaaaaaagcaagtgtattggggttaattggttcattttatcccagcacatctgtgagggaatttgacaaaggtcatgaggctcagcccagaatttgagagccatggacagccatgtcctagagaaagagcatgatgacctgcataggagtctggcttggagatagctaatgggaaagatctgaaaaggccaagggtctatggagagccagagacctcaagacagcatagcagagcaggtcacagagtaggcttcttatcccagggctttggaggctaagaagctgccttgagcactcatcagctggaaattcaaaaagaaaataacaaaaaccaaaataaaatttaagattatttcctttggaaacatcttctcacctcaagtttggaacgagtggtctaatctatttgtcatgtattagtatggtcatattcagccaacatagtggtaattatggtaataatggataccggtaacaataattcattcatttggtgaacaaatgagaacttactataggaccaacactaaactaacaactgggaatagattggcagagactgggatgaagtctgcttccatggagcctgctgttttgtctagggtaatattaactacccttagttgagagtctgctaggcaccatctaaacaagatgtgccatgtccccatccccttccttaacctcccagccaccctctggagatggcactcacagcagacattgttggtccctgttcaaatcctctttgcctggtcggtgcacccagccctgagctactatgagtgttggttgctgactcctctccctgcttcccaagattggctctagaactaccttgctcagaaatgcctgagaagttaggcacactcagggattgtctgtagtcagtgactaatataggagctcccctgtcttcctggagggcaatattttggtgtcattcatggtccacagctcccaggaatcaggcagaggtgagcactgaattgaaaccactactttgcctggcttcttccccttctctgttcagttcccctcatctttacaagtttttctcctgagagctctcccaaaagaaatctcttgcataagagtcaccagagcctcagggacaggactagggtgaggcagaagaggcactcagggcacaaaatgtaaggaggcttctactttcaggggttggctttgcacctgtatgtgccggagagtgagggtttctttaaattttgtaccctgtgcacctcacttgccatctaaacaagatgcgccatacacaccctcttctcctgtcctcactctggccccagttccagacttaggttctccttaggaaacacaactcaagacagtatcttctattgtacctaatccatagttggagacatgaaattggacagactcagaaatttatccaggatcccacagcttggaagtggtggacctcagataatttgaagtcaaatctgattgtattgtcttcagggaaatatgtttgcttatattgggagctgagactcaaaggtgagttaaattgagaaaagacatcccagatcttcaaagagacctccagttttatctggtgcagccactgcctctaggcacctacgacagttgctatggccattttaaggatgaggaaactgagaaccaggtggttaaaagtcaagactgaagccacactaaaggcttaattcaccctttcagagctacctgagtgaggaggaacagaatcaggacttggatgctcatgtctctggctttgacactttgaggtggtcttgaaggttgagagggatctgggggggcagccggtggtgggtggtagaagtagacagtgctgcccaagatggttggcatgatccaagaaaggcaaacctctaccatggatctgacctgagtttcagaggaatggggttgccctccatatctttaagcctggggtgtgtaccactgtctgttggcatgggatttattctctgcctgtaatccatgcatggccttgtaactgcctctctgctaagtactgacacaatcaggtctcaaggaaaaacggttttcctttgctcacctcatatttatcttattatgatctgtccctgcaaatagagcagctgattgtgctattataatgatggcttaagatgtcccctccttttctagttcagtttctaagcggaattacctgttaaacctgccatcttggagttgctaaaatggaaatacaggaagaaaggaattaacctgtggaatggaggatcagtaggctggagggggaacacctgggtgtgtgatctttggccagtcatggctcagtctggactatagtttcttcctctgtaaattggtgggagggaggctctgtccaaccctattttctctctccatccttctagatgatcccacctccccaaactctatggtcttctggatgtgcaagatatgtgcactggtgatgcacgcgagcctaggagggggtagattccagaatatgagtttctggggcctcggaaaggaaacagctatttatcatgcatcattatacaccctgctgtctgcagatacttcagtgttactgcaggggattctctgaatttctccgcttttggcttcccattttccccttcccccagctcaatcccccattgatccagtcccctgcactctggaggctgtttcaatggaaacttatgatctagatctaaatgacttttaagtcaccattgcctggttctgtgccaaacccatgcaaaggaggaactgcaaaattacctaacttttcagagtcctggttccgaatctcttactccatgccattccttactgtgtactggactgtcttctgcttcccccaagtttcttgctccatctttcctccccttgatggcttgatgtttcctgcaacatgattctggatagattctcaagaaagagaatgagctgctgtatatgaagttctatgtgtcccaaatgctttcagctagtccaaagaccaggaaccatatccctaggttttacctcttccctgtatccctgacatctataaaataaaggcttaactcttcagcaatacaacagctagtctcaatgagtccttcccctctccatgccattgtccaggctgttctccctaattctctctaattaacagttaattagagcttattttgtgtttttatgacaaggggatgcaataagcaatctcgagagctgtggattccagaagagggagggctggataagattgtcactcccctcttgtattttgctataatccacatggagaatctaaggcttgctgagtaatgttcagggagctagttctcttctctaagcctctgcattgcccatctgttcaaatgggtgggctgggtagactcagagccaatggttctctgagatgaagccttatgtgctgtctgctggtctttcctgagtctcatggggcagaagggttttgagagcattcatcagttaatgcatcacttgttcattaaagattctttctagacattccacttttccaggcattcaacccccattcccaaccgtgccgacaaattgctgcttgaagttcctggtcccagaggccttcttaaaatgttcaggaatgcaggcatggaaggtaaggaggggagtgtgggggcgtgctggctggaggccagcagccacagccgcgggaggaagggacagaagggtggggtgcaggcaccccgagattgctcagacagcaaggcggtcagtggcatcctgactttgaaagcaatccaaaacaaggcctgcgtcttagtctccagtgatgtcacagctaatcattagcctggtaattacattgaaagccttctgcgatcttatcctcagcagggtcattaatgcaaggcaaccacaccagtaaatgtctcattagtcttatttgagacttatgtatttttcaggactacagaattttaatagtctgctttcctctcagctccccctcctgcgacattaatatctattcctcatgccagactcttccaacacagccccctccctgttttccctgcctaaatcccccaagaggaaggcccagcatggaagggaggctggagtgggggttggtaggggagagtctttggcttcctcgctagccccagctctgtttctggccccagtctttttcctgtaatgacagccttgtcctgtgtattctatgtcttcctcaggaagcctcactctttattttaaccctctttaaaccgtttttttcccttattattaaagaaatgtatgctcattacaaagacaggaagaaaaaattactgttaatctcagacttcaggaagaatgattccccgaccgtctcttgctccccactccagctgtgctggcttttcttctgtccctggagtgggctggtcctctcccctctcagagcctttgaacattgctgtgccttctgcccagagcactttcctttctactctgcccctagctgactcctgctcattcttcaggttgcaactcaaacatcacttcctcctaggagcccttcctgcctgccgttctcattcaagtttagaattgtgcctctgtcatttgatgccatagtctctgccacacatcccacaggtcacaatcaccattagccatctatatgtgacactgattggttgcagtctgcctcagtaggcagcatacttcaggtgggcagagactacccctgtgtggctcatcagctatagagtcccgtttgtcactttatgggcagcagatacaaggaagtactcaataaatacttgttgaatgaatggatgaatgggtggatggattgaagagtgagtggatgaagggctgcatgagtagatggctagactgactgatgaatggatgaatgaatgaatgaatgaatagatggatggatgaatagatgagtagatggatgggtgaataggtggttggatggatgaataaatgggtggatggatggatagataaatgggtagttgggtggatagaccgatgaatgggtggatgtttggaggaatgaatgggtgagtggatgaatggatacatgagcatatgggtgaatgggtggatgaatggctggctggctggctggatggatagctgggtggatgaatgggtgagtggatgggtggatgggtgaatggttagataaatgaacgaatggaaggatagctgaacttattctgcatatccttcttcagtttttccttgacagttttagatatcaataaaataatacaatgtgtaattttgtatctgactttttcattctacgtttttctatgtattaacaactataagtacttttgatggctgtgtagtattccattgggtggacactccctaattcactcaatcagtttcctactggtgtgcatttgagaagatgatatttcatgaaagttaaggcattgggctccagccctaagcaccagggttcagaaattgccataccagcatctcagcagcatgaccacgtgattacagacaggctgtgtaatctctctgtgtctcagtttcctcatctgtaaaacaatggtgataacttctggagttcttataatgatgaaatcaattcaagtaaaatatggtgaacagttctcggtacctagtgaacactaatgactgttttcagttgtcactcatacatgattcagtgaggactgtccaggtggatggagccttaactgtatctctgactgttctgtcaggatagtcagagtgttgctagaattctaaaccttagaatactcaggacaggagccgaaacatctccttttccactaatggactcacaatttaaagtgaccattctgcaaagcatgtctgtcagcaacctgtactatcatttctctttcacatttctggccttgtcctcagatctttcctcctaacagtgtggcaggaagagccagggctttggagtaagggaggcctggagaattttagaaagtaactttcagtttttgagccttagtgttatccataaacagtagcaaacatgcccagattgcaggggtgctgagagaatcaatggacaaatatatgtctggtgtttgacctgtgccagtgctctgacctcttattcctcagtggtcaccatcctcagacatgtgctgagtggcccctgtgtacctggccacatgtcaggggcttgccaggctgtatcacagtaaacaagcaaagaaaggaaggaagaaaggcaggcagagaaatgggtagattttgattatggaaactcagagatgcaaaacagaccttttcctcctctttgcaagctttggttctgaaacgttccaataacatcacccttgcagtcctcatttatttagcatcaagaatttcatggtaggtgaggatgattccatgagataactgttaatacacagtgagtaagctattttgttttcctttactgtaaaaagggacaggccccgaagaacccgaaagtcacagaatcagagtgttatgactggagaggagcttggagatcgggtcttcttactcctagagctggacagaccctctgtcctgagtcacactgcctctggtttccatcattgatgcttactgaactcagaaatgaggtaactatcacgtgtcccccacctcaccttactcccaaatcttttttctcattgctatggagcctgaaggccctcttaccagactatcacgctaggtcacgaagatgtgtcatggagtttggggaccttttcattggtgtatgtgcatcacagggtatgattcatgtggatcttttttgctattgggtacacagagactggcatagtgcctggcctggacacatgtaggggcctcataattatctgttgaatgaatgagggaatacatttttacctggagaaggagctgcaagcctagagaggccagctgccaagcctccttccctggctccttccctgaagcctgtgatatttaattaatatgagccaagcagagcccactttatggtgctggcccaggggccacccataattgagaaatgataggaggcacctgtgacttgaccttggctaatgatgaatggacccatatagagaccaggagccaaggattcatgggctggagcatccatccagagagcacatgtggaagaaagggaaaagagatgtttgtagccctggtctgtgatctcagaaagtggaacagctcctgtgaaattctgatgatagcatttcccagggggaacatgcagaggtgttgagggcttgccagaagccaggctgtggctgagcactttacaaggagccttagaatgacagtaggtgctggtgttctttatggggacttagtacatatctgtttgttgagtaaataaatgaaagaatcgagggatgctttgtagggaagcagaatagaaatagcatctcaccaggtgaaggggaatgagccttagactagtgcagccctctctgctcctgccttttggctctggtgatgttttgggggtgaagaggagctctatgttgcagactccagtctggggtcagctcgtctgcttccctggctccagcatctgaatcctcaaagatacagcccccttatttccctcccaagggaagagggctctatttgagggagatgctgccatcatttccatctccagagaagcagaatcttcggggccttaggtatcccccacctgtgctgagcaatgttctggcacagaaaggaacaccagaggccctttcacaccctccagaggagacattgcacttgccaaaggtataaaagatggaaatagaattcaggtaacaaggctctggtgggtggtggtggggccttcagcagggaagacatttggctccagccacaaggtcacagaagcgtggacctcctatgaccaagaggtgaatgcaaaacgacaagattgcagaaaacagtgctttagagttgatagggcatttttcaaatccagcatggagagaagaaaaatacaattttaatgtttctatgaatggaggcaccaactgctgcttggagagcagaagctgccagccgagggctcagggctgagcagtatcagcactgagcaccgagattcaaaccacggttccaggccaatgctctgctctcttcccccaaccgctctccaccccttctgagccctcaggagagaaagagagaaagagagagagagagaagagagagtacacatctcaccctctctctctttttaattttggtaaaatacacatcacataaaatctacaattttagccatttttaagtgtacatttcagtgacattaagtacattgttatgcagccatcaccaccatccatctcgagtactctctacatcttgcaaaactgaaactctgtacctataaaaagataaccccattcgctcctccctaccttccagtttctgacaaccaccattctactctgtgaatttgactcccctaggtacctcatataagtggaatcatttggtatttatctttttgtgactggcttatttcacttaatgtcttcaaggttcatctatgttgtgactgtatatcagaattttcttccttttattgctaaacaatattccacatatatgagttgcatggatatatcacattttgctcattcattcatctgttgatggacagggtttatttccatgttttggctattgtgaatatattgctatgaacatcggagttcaaatatctctttgagatactgctttccattctgtagggtatataaccagatgcagaatttctggatgacaagataatttttgtttaactttttgaaaatctgccagactgctttctgcagcagctgcacccttttacattcccaccaacagtgcagatttccggtttctccgcatcctcgccaacacttgttatttcctttctttctttttttttttttaatagtggccattctaatgggtatgtggtggtatctcattgtggtattgatttgcatttacctaatgtatagaggatgttgagcattgttttcatgtgcttgttggccatttgtaaatcgcctttccatgtgatgcagagaaaagagcccatcttttaagagtccaaaaggtcccctgctagcctagtcacggctcaacctttaacttcttcactgtgtgactttgcaaaaatggcttcacctctctgggctccagtttcttcattgatgaaataaagaaaattatgcatgcccatgggggccaacatgaggacttgaggagggtttaagattctagtttctagctcatatgaaacccttaatgaatgctaattcatttacctccatagttcatcttcttttgaagttgggatgctggtgattgactaggggtgcagtatctctgtgaactggcctcagtgaccagccagaggcacaaacaggcattcagggaaagggtgattctgacctatgtctttgcttttttaaagaatgggcttgaggcttgcaccatatccagtttggccactccagtgctgtgccggtggctcaccacccagaatttgtggttctttgagggctggagtcatgccctgttcctttctctgttactccataatggctagcattgtagataaagcaaagactgtctaattgttcagcacactaattttccattgcatctagacctataggaaggccgcatttccagcctctcttgctgtgggttggggccatcttactgcgttctggccatggtcattatgagaagggtcagtggtgagggggctgccatacccactcggtcataaggacttacagctgaggcccatcctgttccactccctgcctggattgtgcttctgactccctgagcagttctacctcccaccagaagcagcctctgattacagtcacactgtctccaaaccaccctgaccaggcaaaggactgtagcccagtggtttcgaaacccaggtctactactgcctcactgtgtgaacttgaacatgagcactcactgagcctgctgcttcccttgtaaaatgcgtgtgattaaaattcccactttgttgggttgctgtgaagttgaaacaagattatgcctaacatgctgacaatgatgacatttcccggggaacccagttagtctctagaaggtcagcatctgtaaaataatcttggtgaatcactgtggaatatcaagtgctccctgtcacaccaggggcagccttgggagaatggggatcagcaaactacagcccatgagccaaatctggcccactgcctgtttttgtgcatagagttttattggaacacagtcacactcacttgttagtatatgactgttcattaatgtagggctgcttttgcaatatgatggcaaaggtgagtagttgcaacagagaccttgtggcccttgaagcctaaaatatttctcatctggctctctacagtgagattttgctgatccttggtgtagaacaatatgagcactggcacttataagaccagagttcgaaactcgcctttgccttccttggctgtgtggtgttgacacatattacgtaaaaccaccgttcctcatttgccaaattgaagtgataaatttacaccatagaattgtgggggtgatgagataagatgtttgtgcaaaatgcttctcactgtgtctgcatgcaagaagaactcaaggaaccttcaggctttagctactgtgtgtcacagtccctggtatccagtgagtgctgaatatgttcctgttgcctcatgcaggaatcttccccatcatctctgcctaggcagaggttggggacctgatctctgctacagagtagttagtttctggccccatggtgggcactcagcaacggcaactaaaatgagtccacttagcccttcaaggctcaaagcaaatccaccaattcaaaagctgctgttggcctgggcatggtggctcatgcttataatcccagcattctggaaggtggaggcaggtgaatagcttgagcccaggagtttgacaccagcctgggcaacatggcaagaccctgcttctacaaaaaatgcaaaaatcagctgagcatgatggtgcacacctataatcccagctactcgggaggctgaggtgagaggatcacttaagtccagaaggcagagttgcagtgagccaaaactgcaccactgcacccagtcttggcgacagagagagactctgtctcaaaaaaaaaaaaaaaaaaaaaaaagctgcccttaaaaccagagtggcggcacttttctgtcctgttgccctgtactctctgctcaactgccatcacacttcctgtaagtgatggaaagaagtcagtcagaggaaaaagacagattgagtgcctccgtggccctggcatttccctgcagatctctggatttccatatatttgaaaacctaatataaacaacagagaagaaatttgcatttcgggcagcaaggaatgaaaaattgaggcggtgtaacgtattgctgagccagaaagagggatgaccgtggtgagtccaacctcttacgacagacccaataggccagtggtaaactcatttcctggcagaatatagggttcatctgttggaacatttaacaggcatcaaagaaagatcgcttccacctctctcgcccgagatgccgcgctcctgcctctcttcttgccattttattaaacccctttatgtggttttaatacaatatgtatgatccacatggagacaaataaattcttatgtacttttcaggattcggagtgttctaatggttatgtatgctttatttatattttctgagagacattaaaaggacgatgtgtaaaaatacgcaacccaaaccaatggtgatttatggttactcatggaatgatggcaaaatggaaagttatgaagttaatttccggatgtgtggcggtggggaaggggacactatagcctgcagtagtggcaaaggtcttagttctggcaaaggctggatttggtgggaaatttgtcattgggatgatcatagctctaaggccttttttggaagcagtgtaaagccagtgggaatattaagggtgtttcttttgatgctggagatggggaagggctgcccagacaggttaagtcagttttctaaagtcacacagcaagggatggcagagctaggattagaagtccttatgtggttcctcctttgggtgtcacaaagctgcttaagcatctgccacaggtttcataatgcctctggtggcctctaagtggtaggaagacagccacaactctaaaatgggcagacaagggcaatctgaagtccctctttgaccttcttctagcatgccacaccagggcagagtagaaccagcacgtgcggaaacactggagctaagatctatgcgagtggctctgggaatccactcatgggggcattggggatctggaagctggcagtgccacccacttcatggaccagacaggcatgaatttacctatggcacttggctggagatgttggtttactgggagcctggagggtgaagggattcggggaactcatactgaaacaagttctcccctttcctgctggacttcccccacactctgcccttcaaatctgatgtccactcagctcttgatgttggagtcagtgattctgcagaacaagtgtttagagcctaggctgcctgggttcaaacttcagcctcactgcttaggagggctagctgcttaacttctccgggggcctcatttcctcacctgtgtagagggatgatgactcttactctggagaagtgttgggagctggcgatagtccaatgcacagaaggagcttagcaacgcattcccagtccaaataaatgctggctttcatcactgctgttatgttccacctgtttctggacctcagttttcccatctgcacaataaaagaacttaaagagttgatctgaaactccctaggctgtgtcctggactttaacagggcaatcccaaaatctggcagctccaacattcactaatgcttgtgggatgatatttacaaggggtccttctactttttggcttgatgtatcaaaagctctaaaaacattcatttcctttgattcagcagcttttacttctggaagcttttaccttagaggattaatcatgggcatatgcaaagcattaactacaagcatttctgttgtgttgtttaacatagagaaaattggaagtgacccaaatgggaacaatggggaacaggttaaatccactgtgatgtagcagtagaagatccagggggctaattgggcacttactgtatgcccagcctaggatgagcacttgacacttttgcattgtgcttaatcccaaaatcacattgataggttgtgattagtttggccacaagggagccaagctcagagaagtaaagcacccactctggcaagtggcagagcttggagccaacttgaatttctgactccaaacctggcctctctcaccacaccacgttcctcaggttgatgtcaggaaagtggctccaaggaaaaagggctccttaatgactggcgcgcatggagtcacctgtgagttacaggctttgagaccatgagaacacagcagtgtacttaaacttctatgaagccaccatgtgtgacttgatgtcaattttatcattgtgtgtttatgaatttgccctggaccaccttgctatggtttttatctgtgggaaacatttaccttttgtttactccaatgtcagtttttaggttctaagattatgatgactcagcatcacgtttatgttcctacttttcatccatccctctcaatgtgtgtagatgctcatctaaccaccaactcactccttcactcatctgtccattacccatccctcagtccatccatccatccatccattcatccatccatttgcccatctacctgcacattcgtccttccttttattcactcatctactcacccatccatctacacaatcacccatcaacccattcaccaatatacctgcccatccatccatccatccatccatccatccatccatccattcatccatccatatattcctccattcacccatctatccctctgaccatccatccacccatctttctatttattcatctatttgattgattggtttcttcatttttcatttattcattaaatcatcaaatatttattgaataactcctaggtactaggcactgtgctagtcaccagggttacagaaatgaacaagccaaacacagcctctgccttgaaggatcttgcagaccagtagggctgttgaatgagcaagcaaattattgtgatcatttgccagtcaataaagatttatgttattctgctttatttttctccgtagcatttatcatgcactgccaggacactgtattttactgcttattttttgtcaccccacatgctagctccatgaagtcaggaattttgttctgtgattactgtatcttccactctaggtgagtatctgctcaacacacaattaattaatgacaagatgagtatatggagtagactgaagctgatgtgatcttggccttgccaagctcattgtgtcttgggaattcagataatgatcaaattattagaaaaatgatgtcagtttggaggagacgaacagtgcaataaaagtccccaatagagattttgagtcagtctgaaagtttcgggaaggggtcagagttttccaggtgaaggggtacctgtatgtgtgcaggtagggcacacatacaggaaacaggatagataaggactttgagatgcaaaagagcctttaaaataatcagattctacccatgtacgtagcactttccagttggtgaaacatttttcttctctatggtccttttgtatgcaaagcacatttatgtggcaagacaactgttttctctctctcatatttctggatagagaaactgaggccccagaaaaaagtcccatggcagagtgaagcctcatgccttgactgcagtgctggatggccatgtggccctgctactcatcatggtgatcattgggctggaacatagaatatggttactttaccttcatattgggtgagataactatcgaatgtattgtaggttggtgagtgagctctgcttccaggtgaggtggtggtgatgtgaacactgactctggggccaagcggatgggttcacatcccagctctactaactcctctctttcttctcaggtacaattaactaaaaagtggaatgaactcacgcctgtaatcccagcactttgggaggctgaggtgggtggatcatgaggtcaggagtttgagaccagcctggccaacatggtgaaaccccgtctgtactgaaaatacaaaaattagccaggcttggtggcacatgcctgtcgttctggctactcgggaggctgaggcaggagaatcgcttgaacctgggaggcggaggttgcagtgagccaagatcaagccactgcactccagcctgggtgacagagtgagactccgtctcaaacaaacaaacaaacaaacaaacaaacaaacaaacaaacaaactaaggaacgaaagtggaatgaagacctgacacccatgagtaagtcctcagtaaatgttaagatttcctcccaaaatactgacagaacctactctctgcagcccctgtactatgatctagggatgcactgataacgaagaccagatgttattattgtttatacaccagtaggctgtctaggaaacctctcttcctgatgtttcccaaggcagatgtcaccacgtcctttccatgaaggagctacaattgttgcataactttgctcaaatttttggatcaccctggggtttggtttccccatatctttagttacttctccaagccagacattcaagattacctgactctgagtgaccccatgatggcatgggacctcatggctgacacacctaccaatgcccagagccctggaggaagagcaagcccacttctgatcacacaatgaaattgggggctttctgcagaagactttaatcctgcagaggctgacagtcccaaaaacgagctgacaaggagcaatttatttgagactgtcctcaaaagagagaataaggctagtttgtaggaaacgtgcccagacatctgaaggcacatttccaagatggtacttcctgctggaggccctgggtgatatgaggccacctctctggcctgctttgagggtccacctggcactgggaagtgaggcaccaggaacccacctctcttgcttttaggctagtgctggagttgcgtgtttgctgtgaatcacttacaaaactttcttgagacatcagcatgttgtcttggagcagagagtttcttatggaaattctagtagctgggaaaaaaaactcctaatgtttccttccttccttccttcctccctccctccctgcctccctccctcccttccttttttgacagagtctcgttctgtcgcccaggctggagtgcagtggtgtgatctcggctcactgcaagttccgcctcccaggttcatgccattcttctggctcagcctcctgagtagctgggaccacaggcgcccgccaccatgcctggctaattttttgtatttttagtagagacggggttttaccctgttagccaggatggtctcgatctcctgacctcgtgatttgcccccctcagcctcccaaagtgctgggattacaggtgtgagctaagaaacccaggagtagaaaaagagggctttcatgtgaattactccccctctttggaacatctaatgaatcagtcagcaggtcctgtcagttctgtctccagattcacctctggatatctctagggtctgagcccaactcactatctgcgttgctccactccagcccaagccactatcatttcactcctgggaggcagtgagtctcccaccggatctctgtgcttattctactcctgcctcctgcccctgccttttctctaccagcacagtggaacactcctctgaaacaacataactaggatcctgtcttccacctgttaaaatgcttcaatggcttcctgtggatggagtcccacatcctgcccctgacccaaagaccagtacttcttatcaccgaactcctaacatcattctgattccacttccccttgcttcctgtgccccaagtacctgagtattcttttatttccttgaatatatcaagactgttcctaccccaggaccttctcaaatgctacttattctgggaggggatgccctcccctcctaaactgtgaccatctttcaaatctcagcttcaccatcacaccccttcaagtacgttccctatagtagcaaccagtccatgaatctttcataatagttagaactatttacaactatattttgcttttttttttttttttttttgagacggagtctcgctctgtcacccaggctggagtgcagtggcccgatcttggctcactgcaacctccgccccccaggttcaagcaattctcctgcctcagcttcccaagtagttgggactacaggcacccgccaccgccactcctggctaatttttgtatttttagtagagaccatgtttcactatgatggccagactgatctcaaactcctgacctcatgatctgcctgcctcggcctcccaaaatactgggattacaggtgtgagccaccgcacctggcctatattttgtttacttttttaccttgtgttttatgtactggactacaagctccatgaaggcaggaatcacatctggtctgcccactgctgtctccccaactccagttttcaagctttcattttttatcatgaacataagaacaatgctgccctaatcatttgcatcattatgaagggggctaatgatccaaggcctaggtgaaattgtggatgtggaaatgttttcacaggtttcaatgacccatggtatgaaggggaggtgcgggcggattttctgagagcatagtgatcctgtgacccctatttgctgaggaagctctgagttcaagaaaatgacttcagtctagcaggggaaaaaagagcccagcctttggagttgaactaacttaggtcaaatctattttctgctttcttaccacctatgtgcccatgagcaagggactttggtttttctcctgtgtcaaatggaataatggtgtcattagggtatttggggggttagtgggtggagcttcatgaggagccataaaacaatctcaatacccatccagtgtcagtgtccttgtgttgtcttgatcctcaagatgacccaacatttgagtccatggacatggtcctcgcatctatctataagaccttgaagacctctccccactctaaagttcatggaaatcatactaataaagtgactttaaaaaactcgaagtccaacctagatgtccataaaaggaagaaatgtggtatgccgcctcaaagtggaaaaggaattcggaagtcaagcacgcttcttttaaatctgtctcctctccaacctgtcccctccccaacctgtcccctcccagtggtgaaaccaacaactcactgtgccctgcaatatgaaaagctcatgatggaaggcagttgagtctattgcaagcttgtccaacccatggcttacaggccacatgtggtccaggtcggctttgaatgtggcccagtacaaatttgtaaaccttcttaaataatttttatagatttttttgtattttttttttttttttttttttttttgctcatcagctatcgttagtgtatttttagtgtggcccaagataattattcttcttccaatgcggttcagggaagccaaaagattggacacccctggcctagtgattaagtaagcacggctgctctgccacttcagagctgtgtgactgtaagaggtggaatggcacccctaaaatatatgtgtctctggaacctcagaatggggcgttatttggaatagagcatttgcagatgtaattaaggtaagaatctcccgatgatattatcctggattaaaatgagccctaaacctaaatttatgttggggctcagaaggccacaccccgaagactggcgctttgacacgcagagaatcaaactcagaatcgaactccctcccacctttttttttctctcctaccccaagcccaggaagggactctctctggaatttccttatctgtctgaaaaagcttctttccaaaagaaacacaattgccttcctcccctttctgaaatctcattatctatcttagaaaagaagaccaaggagtgcaatcatacctggagggactttttcacaagataatgtctgtctctagggctcattcaaatttacaagttaatttctgtcccttccttacccctaataatcactagctgaccctcgaaagtattatagacattccctaactccctctgcccctatggaacagggtacataagcttccctacctcattaggttattggggaatcattgtcttgtgattcccctgtgttttgtgcattaaagtaaattttgtgtgccttttcttctcttcatctgccttttgtcagttaactttcagggaagattcagagggcgaagaggaagttttctctttgcccctacacttagaagagaaaggaagaagggaagacagtgacccagaggagaatgttatgtgaagatggagcagagactggggtcaccagcctacaagccaaggactgctgctgcccccagaagctaggagagagacgtggtacagattctctctcagagtctccagaaggaaccaactctgctaactccttgatttccaacttctagccttcagaaccgtgacagtgtaaatttctgctgttttaagcctcctagtttgtagtattaggtcggtgcaaaagcagctctggtttttgccattaaaaccacagttgcttttgtgccaacctaatactttgctatggtggccctaggaaacgaatgctgtgacctcagccaacttggttagacttttcaacctccctttcttcgtctataaagtgggcatcttgtagactttattcttgagaggcattgaaaaattaagaaaaatccagcctgcagactattggggatattgcctggcacatagttggtgctcaataaattgtagttattattaattgttgttaatactgatgagtcttctcttgagctccttctagcttaaaccaaaacagttccttgccctccctttagcaagaaaatagcctccctggaaaaggcagggagtgggggtggggtgggagggaatggagtgccctttaagttggccatgacagtaaagaggacactgatctccctcgttgtcaatcctaatgcccttgcccctacttccatttcagcagccaccattacatacctctgtatcattgacatttctctaataatctttgacccattcattctcagaaagaggaacagttttatttttcaggaacaatactagggagcagttttaaaaatgcagtgcttgctgataaatgttaaggactcatctcctggcctctctctccttctctttctatctcactcttgccctgtctctttctctatcttcccctccttgcctctctcctccctcttttcttccccctccctctttttattggaaatggctatccttcaaagatttaacagatttgtaaaaatcatgcctccaaaaggctaccatttaataggagcactcagaggacagcgtgtgggtgagaagcagcaccataaattgaacatcgccagcccacggtgcgccagctcagggcgggcccagagtcataactttctcctcttcccctccctaccctccaattccatggcctttgccaacaccattctattttcaggaaggcttccttgacccgtgggtccttcagccacaacagaggtggtgccgactggaatccaggcatgaaattatgaaagaatggggctgctgctgactccagttgtgcactggcctcagatgtgaaattgccatttttttctcccctgtctcactggcctgtcgcatgcggggcggaaaagattgtatttatcacctgtcaggatctgccagaactgagttacgtgaggcaggacagcataaaattatcatacacaagcatgaaattacaaaatcgctcggaactgaacaacaaaattatttcatttcggagggaggccattccattttttagccctgacaccttgactgccaaactttgaatggaaattgagtgtgagggccatggagtagagacagcaataacaagaagtagcatgtaaactagccatgcagacacacaacattaatggtcctcgaaacctcccaccagagatatgtaactaaataaatgtcacatgtcccagtgactcaacttgccttccacaactagaaatgacttaggccagtgttaaagcctaggtccaatatctaggggtttctgggagaaactgggtctgggttggttctcctaatccacagagcgatatcccgatgaaatagaaagcttgcaggctttggagtcatgcatgcataagtttgaatgctggctccaacattaacgagctgtgtgacgttgagtgactttcttaacctgtctgagcctccatttcctcatctgtgaaaatgaagacaatcatttctgtttcttcaagttgttgtgaggacaaaaacagctcagatatggagtctgacgtatagtaggttttcaatatgaaggttgggacaagtgaattacctgccctcatctttcccccttcaaagtttttgtgccatttttacactctgtggtgaaagcatttatccaacaaacttttgctaagcatggaaaaaaaaactgtcacagttaatttgtgtttagatataaaacagagttaggctggattattgatttttgttcccaatgtttcaagcttccatgtacctctgccctttgccatgtgactttgaggcccttcctactagaggtggggcttatttcctcatccagttgttactgggcttggtcatgtgacttaatttgaccaatgatccctgagcagacataatgcaaagggaagatttaaatatactgtgtggtttgccttggcttcttgcagtcctgttatttgcatgagaacagcatgccccaggtacatgccggtctatggaggaagagagagaggtgaagcagcctagagtcaaatgcagtcaatctgtagggcttctgagtaagaaaaataaatgctttttgccagtaattgagatttttgggattatttgttacacagcaaacactgagtaataaaatagctagactcaggtgtttataaacaaaggtttaccttcatgaatgttctatagaacatttaaaatttatgtgtgactcagggtgattctttagtgagtgcgaattacagtatgactagagtctctggcttctgccacttcaatatcaatgttgacctttcaatatgggaactagacagtgaagctctgccttaccagaccacacatactcttcgttatacacattataacctccacttcactattctgaattgaaaatcatacatttcatctacatatacatgtaatttcaaaaaagttaatataatgccctaactgtaagggaggaataaaatgaaagcaatttataataaaataatatctattttaatatgtaaattatcaaaaaccactatatgccaggaaacatgatgaagcggtctgatgcttgtgtctacttataatgagtaagttgaaatttcagacaaatattcaattgaatattgtcgacatttttttctctatttttgacattttgaaataagagctaaattagtatattcatatatatgggtagtgtcactgtgaataggactgcaaaagtcgactgacacaggtgtgcaggcagcaattcacgttccacgatcaactttgaggtcgatgcctggattttccaaagtgaaaaacaactcttgttggggttttggataaaacaaagtattcccttcccccaatttacactgcaactacattcaaggaaaatcccatgtaaagcaaatctgtgccaaaacatttagctgtatgtaagacggatttaaattctaggctcagataattattaaggaggaattatatctacatgaatgcccagaagggcactcaaaattcctgaggcacttggggccattcttcttgctgtgggactgtcttgggaattgcatgtcctgcattgctgatgtaattctccccaattactaggacggatcttctcaaagttagtaccattgacatcttggatcagatcagattaagtcgttattgtagggggttttcctgtgcattgtgggatgtttagcaacctccccggtttctgtgatgccagaaacatctcccccttaagttatgacaatcaaaaatatctctagatattgccaatgtctcctgagggtgcaaaatatccacttgttgagcaccactgggataagataatagaaaatgcttcacatcctacattcctaaaattccccttaggagatgctactaactccattaagatacacttgtccaggaagccctggattttattgtattatttcattccaataccagaaattgagcacttatgttgtgtcaggtgtcattgatgtagcaaggaatatgacgatcttttaactctttgggttcaaagactatccttctgcctcccctctgctgtccttgctcacagtgggaagatggccccccagggagttgggagctgggactggattgtggaaagccttgaatgtcaagccaaggagtggtcaaacctcagaattaggatgaatcttaagaaacgtctggttggccgggcgcagtggcccacgcctgtaatcccagcattttgggaggcccaggcgggtggatcatttgagatcaggagttcaagaccagcctatccagcagggtgaaaccccacctctactaaaaatacaaaaattagctgggtgtggtggcaggtgcctgtaatcccagctacttgggagactgaggcaggagaatcacttgagcctgggaagtgaaggttgtggtgagccgagattgcaccaatgcactccagtctgggtgacagagtgagaccctgtcacaaaaaaagaaacatctggtcccccagtggccatgtccaccaaaacaagaccttcttctgaggtgatggtgtcccctgtagatcccttaaaaaggaaaaaaatacaaggggagagttaggttattccaagatcagatagtagaagggcgggggaagaggtgcagaatttaactgcagtctgcggcagctccttctcatttcctttcccctgctgggctatgagagttactatcttacagaactttctcaatcccttgcatggcaaggagtattattctcattttacagatgataacactgagcctcaggtagggaaagtcatttgccaaaggtcactgagcctgtaaatgtcacaactggaatttgaaccaaattccccagagattcggccaagtgctagtacctcttatgtggtgactggacgagtctccttaatggtttcattgagtccatgttagtcaccccacctattggtccttcactccacagcagaggggtttcaaaacgtacagatctgatgtgatgaagttagtgcatacctttctcttccactgattctagggctaagccctagaatggccacatccacaatggccacaatgccctatgagagcttcctcctgcttatctctccaaacccatctctctacccttctttttgctcagtctctgagcttcaggcatacaagttatctcttggcaacttggggcctttgtgtatgatatattccctttgcctattcagatgcttttcaccttctgctctcccaaacctcagatcaagcatcacttctttatgcaagtctcttccatccccatttatatccccagtcgtctgggtcaggtccatgtattgtatatgctcatacaacagtgtttctttctattgtattattaaatgttaatctattctcttccagtaaacttcccacaaaagcaccagctcagcttgctatggtcttctcattcactggcttactgcatggcacatagtaggtgctcaataagtgtctgatcggtgaatgaatgaatgtctgactcagattcctgtgcttcatcttctgctcccaccaccttaacatttgtttggcattgccttgagggggtttgccactcctcttactcattggtggggtccatgatagcccatcagggggcatggtgtctggagtctcacagtaaatggctgttggcttcaagctgtgctggactaccagcacccatgaggagagctgcaggctgcagtggggaagcaacactgtcattttgcagagtgctaacagctacaggtaccagtcacaggccattgccccccagccttcaccacgtaaatcctccactaacgatttgtataaacttctgttacatgtgttatttatcactgcaaataacttccacagtgggttggactgtgtgctttgtgcattcacacacacacacacctcagggaaaagcatgggctgagtggaggagggggtcccgtagttaaactgcctgtgtagggctcctggctctacctcccacttatgagctgggtggcattgggcaaaatcctacccctcgctttgccttgttttcctcaactgttctgttgggataagaatagtgcccacatcaaaggggactggaagaattaagtgagggcagataaagcctcacatggggctggacacatagtaagcactcaataaaaattagttgccaccaccaccactaccatcatcaccaccactatcatcatgatcaccatcaccacatcatcatcaccatcatcaccatcaccatcatcatcaccaccatcatcaccatatcatcatcaccatcatcatcaccaccatcatcaccatcaccatcaccatcatcattatcaccatcaccatcatcatcaccaccatcatcaccatcaccatcaccatcatcaccatatcatcatcatcaccatcaccatcatcaatatcaccatcaccatcaccatcaccatcattaccatatcatcatcagcagcagcatcatcattatcaccatcaccatcatcattaccaccatcatcaacatcgccattatcatcaccatcatcatcaccatatcatcatcatcaccaacatcatcatcatcatcttacacagggactctaggcagcatcccactccacgaggctgtaagagcaagagagaagggattccatctcctgctcatttaaagtctctagcacacatctctgtcacacagtaggtgctcaaccagtattagttaaatgagatgagacagattcaggctcagaatcagctacagccctaagccagttgcatagaaggggccagattcacgtgcccttatgcccattttctagtcagtgcagatggtgacctactctggccagatgagtgaccttggctaagtcacctcacctctcccagccttggcttcctcatctcaatcaaattaaaaggggtggtggcttcctttcaccatcctcctagattttggaagaccaagtgagataatggatgtggagttcactcagagtctggcatgcagtgagtatccaaaaaatgttgggttcgagcattcattcaatcaacaaactttattgggtgtttctatgtgccagacactgtactaggcacttgggcacaccagtgaccaaaaccctgtcctcaagagttttcattccagcgggaggagaaaaatatgaaacacaagttctgaaaattaatctcactattgaaaaaagagtatgctgaggggatcaacatgatggagcaaggggttgcacttattggtatggtggccaagggaggactcattgagaaagatgccattcaaacagacttgaagaagtcatggatatatttcccagtatctgtgggaaaggcatttaaggcagagagaacgcttgtacaaagtccctgaggtgggcatgtgcctgttcaagaaacaacaaaagtgaaggagttgatttgcctggggcagagtgagtggatacaggagatgaaatcaatgagttcacatggacctagactgtgcagtcttgtgggacatcataaggactttggtttttacttttagtgggatgaaagtcatgggaggctcttgagtaaaggagtgccaagattggacttagattttgaaaggatcacttctgcttccatagcagtggagaaagagcagaagccaggagatcagttaggaggccactgcagtgcccgtggcacagggccatggaggctgggtgacaccttgatacatctttgctggggcttctcatgtcacccttcttagggaaaagaaacaggaaggcattcagcagacaacactcacttcggctgtgagagccatgcccagtttgaggatggccattccacactgggtgacactgtctccctcagcacctcagatgtgcaggacaccaacactttctccttccaagccccagttctgtccatctcattctgactccttgctgctccacacctgccttgccaaaccccagttgtgtttggcagcctgtgtgaaccttggctaccacccactagccacctggcccgcagcagcccttgggaacagcagctggctgggtatgtccagggcctgatcctcctgggtcattggtcagggctttgggccacttcttccctgtatcagtttctagggctgctgtaacaaagtaccataaacagggtggcttaaaatagtaaaactttattatctaacagttctagaagccagaagctcaaaatcaaggtgttgacagcgccatgctccctccacgcgctctatggaagaaacttccttgcctttcctggcttccagtggttgctggcaatccttggctttccttggctttcacaggcatcacgtcaaattctgtctctgtccttacggggctttcttctgtgtatgtcttgcctttgtacatctacaaatctccatctccttataagaacgtcagtcattggatttagggcccaccgtaatccagtatgacctcatcttaaattggttgcatctacaaatatcctatttccaaataaggccacgttcacaggtaccaaacgttggagtttcaacatctctttttaggggcatgactgtggtttggtctaccatctcctctcaacttcctcactggtctccctgccatcagcctctacctctcctgtccagcctcctccctgcagtcagaaatctctctaaactatctgagagtgccacttccttgcaacaaacccttccatgccctcccaataaagtcagcactccttagcatgtcattgaagaccctgttgttctggcccttgtagactctctcttctccctgtgtttggtctcgctagtttagcttggtagttttcaccactggctgcctattacagacaactagaaactttcaaaaaatgtccatgcctgggctcctggactaattaaagtggatacctgggatagaggctggttgctgtgtgctgtggaaactcccaggtgattccaatgagcagtcggggctgaggacaactgctctggctctaccagtgtttctcacactggagcaaaactcagaaccccctggagggcttgttacaataaggacttctacccctcagagtttctgattcaacagatctggagtggggccagagagtttgcatttttaacaagttcccaggcaatgctaatgctgctggtatactggagtttctcaaccttggcactattgacatttgggctgggtgattctttgtggcgggggctgtcttgtgcattgtgggatgcttaacggcatctttgccctcaactgttagatgccagtagcacccctatcccaatacacatacttgtaataatctgaaatatctccagacattgccaagtgtctcctagagaagaggagacagaatttctccacacagtggcactgggtaagcacagatgccaggctggggccagacagtgatcagggaaggccttggtggttgtgataaatgacagataactctcataagtgtgactgacatggcctctcctgcctcagggcctttgaacatgctgatcctgttgcaggcagctctattcccttgtctttccctgactgtctactgtgggtcggtcagctctcagtttctccatcacctcccccgggaggccttctctgatcactgcctgatgccagcctggcttctatgcttacccaataccacagtgtggagaaatggacagtccacagctgttcctgacagcaaccccaaagggatgccccacagaggagtaaagcaactgtgcatggctagagttcaggggaaggaacgttccctggggctaggccagaatgggaaggcttctggaggaggtggcctcagaaccataaaggatgggtaggtactggataagctgagaggaactagggggacactggtcctgagggaacctcgatgcgtgagtgtggaggctggaaagccaaggctatttccttgcctgtaaaatgaggccaataatcacacctgctttacagaattgctggggggatctaatgcatggtatgcgccaggtaggaagtgcccagtagatgtcagagaggatgaagatgatggtgggtggggagccttgatcattccagtgcggctggaatgggttgggtagggagggggcttgtgggagagaaccagagagggtgcttggactttgaggcaatgcaaaggcatggaaggggttggggcggggcagggcaggggatgtggaatacgggctctttggggagtctgtctgcaaggcgaggttagaagcaggagcacagggagaaaatgtggcagccaaggttctggcaggaaacaggtggaatctttcgacgggaatttgaagagtagtattaaagggattatttacaaatgtggggacaggatgtagggatatcagagagcaggggcagcactggggttagtcatagcaggaagctgttactacctctaagcgcaaatgggcaagggaggtgagaggttcccagaaccacaggatagggagggtgagtgatgggaacctgcggacaggagctgtggacctcagtggtggggaccagcctgctcgagggacttccctcataggaagccttcaaccttacttctgtcatctcctgctggtccttgctgttggcttaacacaacaagaaacccttgatgcatgcacaggtggacctccagggcagagagtggggtggagaagggtgcagagtagggcagatgggctgatggaaaaattgccagcactgactagataggaaggccagagtgtgtgaagtgtgtgtgtgagattatgtgtgtatgtgtacttgtgcacatgagtgtaagagagagtctatatgtgttcatttatatgtgagtgtatatgtgtgaaagggtgtacatacgcgtgtacatgtgagtgtgtgtaagtgtgtgtatgagagactgtgcacagagtacatgagtgtgtatgtatatgtgtacataagagagggtatgcaggggagggagagtgtgtatgtgtgtgagagatggagtgtgtgtgggtacatttgtgtacgtgtgtatgggagagtgtgtgtatgcgtaagagtgtggatatgtgtgtgcacgagtgtgacagggatagagttgtgtatatgtacatgagaaagatggagtgtgtgtacatgtgtacatgcatatatgaatgtgaaagtgtccatgtgcatatgtgtgtacatgttcttatgagagtgtgtacatgtgtggacaaatatacataagtgtgtgattgtgtacgtgtgtgcacaatatacatgcgagtgtgtttgtgagagaatatgtacatatgtatacaagcatggatatgtgtgcatatgcatgtgtgtgagagggagtatgcacatatgtgcacacatgtacatgtatatgtgtgtatgaattcacatgagtgtatgtacatgggtctgcatgtgtctatgtgagaatgtgtgcacatatatgtgtgtgagagaggaacgggagagagagagagagagagtgtgtgtgtgtgtgtgtgtgtgtgtgtgttggggaatgagggagacagtggctggggaatgtagaagttctctatcacctggccaggttataaaaagtgaaggtctcaggtgtgaaataaaacaaccaccttggtcacaggcttccacaatttttggtaattatgcagatgctgcaaagatgcctactactagaagccttcttcctacgtgctgtgcacctcacgtgcatgtgacactcaccaccttcacagtgggtattgctttccccctttacaatgaggcaccgagaggtgaaatgacttctccagggtcacagaattagtaagtggcagcaccagaacccaaactcaggtcagccccactgcagcacccccaatggcacagtgccttcaagacactgtcgaggccatgccctggctttctagatggggaaaatgctctgagtcaggaggggctgtgactgggagctagagcccacagtctccagcctgcagttcctctatcccctgggtgggtcaccaccatcaccccacggcccgcatggataccagctttattccctgagaaagagccacttgtttctcacaaataaaatactgtaggagtgttgctgggtgactctcaaggcaagattgaattggtgctgtagtttctgctccagctctccctgaggacacgcatctttgggccctgaggctgccatgtgacatgtttgtggccctgaagctgccatgctgggaagaccatgtggcgagagggcatggagacagagatgcccatggatccctactgtcccaaccaccagctgttgtatctgcccagctcaggcaccaggcatggaagtgaagaaactttgaaggtatccccattctggccaccatctgactgccatctcaagagagattccaagccagcaccacccagcagggctatttccaaattctaaatccccagaaaccatgagaaatagtgagtagttgttatttcgggcaaccaaattgtgggattatttgttatgcagcagtacttaactgatacatggctgaagattcctgctgtcttctctttatttggcataacaccccatttcttacacagggaatctgttctgaacccagatacccttttctgacagtggaaacttccaattattggccagttggtgcatgttgggctctgtgcttaaagctagtatggtacatacatgatttccttaatcttcttaacaaccacacaaagaagatagcattattttcattttacggatgagaaaactgaggctcagagtagtggaatgatgctcccaacttaaagatgggcccagtggcctcaaacctgagcattttccctgagctagtctgaactgagctagccagggggtcaggtcgtggtcttatccctggacattacaggcttctgggacaggtagccaggcaaagcagggtatgaggctgggttggaggcctggtctgaagagcaggtcagaggaggggagagtaattctgctacaaggggcttccttagcgccagtgacccaagatagattgacgatagccttccataccatcctgaccttctggaagtgtggagactgctgtcttaccctgctcagggaagactggtgtggcgccaatatactgtggatgcggcccccgtgaatgtgctgtctgcagctccctcttcatctgaggctaagcccaggtgctctcacagaggcccctgatgccccaaaacgtgccaggctctgcccatcaaagcagatagcatcatctcactaccccaaggctccatcttgcagcccattctcggtccaagcttccaatagataatgatacttcatttagaccagtttcctgttcattttaaaaagatttacttaacaattaagcatttattacctttctctttatgag

SEQ ID NO: 52 - DNA, 386 bp, Homo sapiens
gctcaaacaaaaagaaaaagatgaagagaatgagaaggaaaatgagaagaaaagttatctacaaaaaattatatatgcatgatgcctagagttcatatattggtaatttcatttttaacggtgcagctgttattcagatttttgttttacttcagtactgaacacaaaaataaaaaaactttccaaacggaaataatgtttcgttgtgttttttctcagcctgtctgagaaacattctaaacattctttgtgactacctattcattcattcattcattcagcagtcagcaagcatagagcagattttgtaagccaagaacagtgccatgctgaacgctgcagagacaaaagatgaataggacactggctctggtcttagagggtgg

SEQ ID NO: 53 - DNA, 6339 bp, Homo sapiens
ggtcttctcagcgcagtcgggcgcggacccgctggtcccgggcagcggccaaggctactggggcgggagcagtgggccggtcggcggcggcagcggcagcggcggaggaggaggaggctggagtgggcgcggaggcgaccgccatggcgttcctcaaactccgtgaccagccatcactggtgcaagctatatttaacggagatcctgatgaagttcgagcactaatatttaagaaagaagatgttaactttcaggacaatgaaaagcgaaccccattgcacgccgcagcttaccttggagatgcagaaatcattgaacttcttattttatctggagctagagttaatgccaaagacagcaaatggttgacacctttacacagagcagttgcatcttgtagtgaggaagcagttcaggtacttttgaagcattctgcagatgttaatgctcgagacaaaaattggcaaacccctttacatatagctgctgctaataaagctgtaaagtgtgctgaagctttggtacctcttctgagtaatgtaaacgtatctgatcgagcagggaggactgcattacatcatgcagctttcagtggacatggtgagatggtcaaactactcttgtctagaggtgccaatattaatgcttttgacaagaaagataggcgtgctatccattgggcagcatatatgggtcacattgaagtagtgaaattgcttgtgtcgcatggagctgaagtgacatgcaaggataaaaagtcttatacacctcttcatgcagcagcctctagtggaatgatcagcgtagtcaagtaccttctagatcttggagttgatatgaatgaaccaaatgcctatggaaatacacctcttcatgtagcctgctataatggacaagatgttgtagtgaatgaacttatagactgtggtgctattgtgaatcaaaagaatgaaaaaggatttactcctttgcactttgctgctgcatcaacacatggagcattgtgtttagagcttctagttggcaatggggccgatgtcaatatgaagagtaaagatgggaaaaccccactacacatgactgctctccacggtagattctcccgatcacaaaccattatccagagtggagctgtaatcgactgtgaggataagaatggaaatacccctttgcacatagcagcacggtatggccatgagctgctgatcaacactcttattacaagtggtgctgacactgcaaagcgtggcatacatggaatgttccccctccatttggcagccttaagcggcttttcagattgctgcagaaaacttctttcttcaggatttgatatagataccccagatgattttggcaggacttgtctacatgcagctgcagctggagggaatttggagtgcctaaaccttctgctgaatactggtgcagactttaataaaaaggacaaatttgggagatctccactgcactacgctgctgccaactgcaattaccagtgcctgtttgctcttgtgggatcaggagcaagtgtgaatgaccttgatgaaagaggctgcacacccctgcactatgcagctacatcagacacagatggcaagtgcctggaatacttattaagaaacgatgcaaatccagggatccgtgataagcaaggatacaacgcagttcattattcagctgcttatggtcaccgtctatgtcttcagctgattgcaagtgaaactcctctagatgttttaatggaaacctcaggaacagacatgctgagtgattcagataatagagcaacaataagccctttacacttggctgcctatcatggtcaccatcaagcactggaagtgttggtacagtctttgttagatcttgatgtcagaaatagtagtggaagaacacccctagatcttgcagcttttaagggccatgttgaatgtgtggatgtactcattaatcagggagcctcaatcttagtaaaagattacattttgaagaggacacctattcatgcagcagcaacaaatggtcattcagaatgcttacggctattaataggaaatgcagaaccacagaatgcagtggatattcaagatggaaatggacagacgcctctgatgctatctgttctcaacgggcacacagactgtgtttactcattgctgaacaaaggagcaaatgtagatgccaaagataagtggggaaggacagcgttgcatagaggggcagttacaggccatgaagaatgtgtagatgcattacttcaacatggtgctaagtgcttacttcgggatagcaggggccggacgcctatacacctgtctgctgcctgtggacacattggtgttcttggagcccttttgcagtcagcagcatctatggatgcaaatccagccacagcagacaatcatggatatacggcacttcactgggcttgctacaatggtcacgagacatgtgtagaactgcttttagaacaggaagttttccagaaaacggaaggaaatgcttttagtccattgcattgtgccgtgataaatgacaacgaaggtgctgctgagatgttaattgatacattaggtgccagcattgtgaacgccacagattcaaaaggaagaactcctctccatgcagccgccttcacagaccatgtagagtgtttacagctgctgctcagccataatgctcaagtcaattctgtggactctacagggaaaacacctcttatgatggctgcagaaaatggacaaacaaatacagttgagatgctggttagcagtgctagtgcagaactgactttacaagataacagtaaaaatactgccctccatttggcttgtagcaagggtcatgaaactagtgccttgttaatactggaaaagataacagatagaaacctcatcaatgcaaccaacgcagccttgcaaacacctctgcatgttgctgcccgaaatgggctaacaatggtggttcaggaacttttgggaaaaggagcaagtgtgcttgcagtagatgaaaatggctataccccagctttggcctgtgctcccaataaggatgtggctgattgcctggctctcattttggccaccatgatgcctgtctcatcaagtagtcctttatcatccttaacattcaatgccattaaccgttataccaacacctcaaaaacagtcagctttgaagctttgcccatcatgaggaatgaacctagctcctattgcagtttcaataacattggaggggaacaggagtacttatacactgacgtggatgagctcaacgactccgattctgagacctactgagaggctgaggaggagggagttctcacagtaaagcttcaaactgtgctttttcaggaaaaaggcactttgatattcacgtagaaattcaacctaagaggaaagatcccacagtgagccaatgttaagagatctgatggcattaggaggaagagttttaaaggcaagttttacaaaaggaacttctagaatcttgaaatagacctgactgaggaaaacacattgatgtcagaattctttgtggaattgtttaatttggttttgcagtgccaggaacaattggggacactgtgcactctaacctgcttacacaagcaacactattgtaacagaagaaataaagacactagatttaaattttatcaataaaattacaactaaatttaaaggcaataaaagtttggtacagtaggcattatgtgcacagcaaattgcaaaaggaccaaataactgaaaggtttttttaataaaatgccattttgtggaaactggagtagattaaatgaaacattacctaaaccaaactgcaatatttctggaaatgaagctgagatttggttttaaatgttgagtttttttgggttttgttttttttttaagaaaacatctgaaagccttccaatgctgtattaaaccatgagagaaagcagatgtatttttacatttttttcttttacagaactatttcaaatttccaatttttatactattagaattaaaaaccagctgactgggtgcaatacgggtgaaaatacttgtgacatagacattgagatggattggggtcaggctgttgccctgttttgaatggtttgggtttaaaatagtactatttttgtttgaaaatgtaaagaatttcctagaaaaaaattcatgaaatcaaaaagtagactatttcaccctattgcagctaagtggtcctggggcatggagtcttcaacctctctatgaatggcacaccttagtcacttatgttacttttgtgtccccaccatgggttgggggattttttgtttattctgatctatgagttttgaaaaagtgaataatcaaaaggaaaataattccttgttgttcataaattaagcatcactaaagtctcttgaaaggcatttctgtattgggcaagatttaaaatactaaagccttaggtcctattcatatttaaagtagcatgtttgtaacctgttactatttggagagagaagcagttgcctgccaaattgaagactacctttcaaatagcaaaagagagagagaaggctgatatttcggcttttaaataaagatttgtgtggttctgcttttactgtaactgtcactttcccagtgaaaatgatttcatatacattgagggtcttacaggtatgggtaaagttctataaattgcaacaaaatgatacccaatttcattttatcctttttgtattgtgaaactggaaactttatgacattgtaaattatcagctggtttttctgaatataaagtgtgaaaacacagaacagtattttgatctatttgataattttgtgggttttttgaagaattaatgagcatgtacatagaaatagtgactgcttgaatactgtatttacttgcactctttcagtacatcaagattcctgtatattttagagtataataaaacacagatgtgagttgtatttaatgaataatgtatttgtatctgtgcatattatctacaaatctataaagtttctagggcattgactactagattttaagcattttttctaaaatatttacagaaattataaatctaatcccccatcttttctttataatataaagaagtcataatgaacccttcctaattattagtagtaggaaggtgaatatgcattttaatgacagtggactacattttctattgtaccttttgaaaaaaaaaaaaatcaagcagattctaaaagtatacatatgtgtgctttctctttccttttaggaattctcttctgaattccctgagggaattttctagaatctcagaattgaaagagacctgaggttcatccagtctctaacctcttaacaaatgcaggagtcccttctacaagggtgatctttccaccttgaacacttccaagtgactctacctcaccaagcagtccattcagttgttgagcagctctaactgttagaaaggtcttccttagatggagttgaagcctccctcccggtaacttctgtctttgggcctgggtctgtcctccaagagaaccctgagaatgttggaaggatgaatctcgcacattctgccatgtcttctcttttacaggctgtttgacttctctgctgaagtgatttccagaaggactcatttgacacactattagatttaccacatctaatgaaatccaaggtgtagctataaagtgacaagctgtttttaatttatcacatacaccagaacttctatcctgcatcacttatatgtaaatgatgctgttaccaaaaacattaaggtagttcttgcgaatgccaccccactaagaaaactatttcattacttttgtaatccatctgtgagagtctgccccccagcttaaccacttcctttggtctgcacccaatgaagggaaaccccaaagtactgtctcaaatggtatttgaactacgccagtattgttggaataagtacattaattacttgaatgaatgaacacagcaccgtagaaatttcctttatggttacaccttgtatgtctaaagcattcaggccctgttctgtagtgtttcttatcctcacacagagtagaaaagcctgtttgctttatttaacttatacataaaagatgacatctgaaatatctgatgtgtattataataccagcttctgctctagaactactttgggtgaaatggtggtaatagcaaatgacctcctttaacaagacactcatctcaaacaatgccatttagttcaggagatctctaagtgtagctgtaaattttggggttaatttggcttatattggaccttttaaaagaaataaagttttttaatgcaataaa

SEQ ID NO: 54 - DNA, 2425 bp, Homo sapiens
gcggccgccggtcctccctccacctcctcctcggccccccctcgcttccctcctcccacttcccgagctccggcgtcgtcccggccacgctcgacgctgctgcaggaacaaaggaagaccccgcggcggcggcggcgccacctccgcctgctgctccgacccgctcccggcccgcggcggcggcaccagggcgcccggctcagccttcccggaggcctcggcccggcctcatcgtgccggcttcgcgcgcgaacccggctttcgcatttgggaccctgcaggaaaaatatggctcaggagactaaccagaccccggggcccatgctgtgtagcacaggatgtggcttttatggaaatcctaggacaaatggaatgtgttcagtttgctacaaagaacatcttcagaggcagcaaaatagtggcagaatgagcccaatggggacagctagtggttccaacagtcctacctcagattctgcatctgtacagagagcagacactagcttaaacaactgtgaaggtgctgctggcagcacatctgaaaaatcaagaaatgtgcctgtggctgccttgcctgtaactcagcaaatgacagaaatgagcatttcaagagaggacaaaataactaccccgaaaacagaggtgtcagagccagttgtcactcagcccagtccatcagtttctcagcccagtacttctcagagtgaagaaaaagctcctgaattgcccaaaccaaagaaaaacagatgtttcatgtgcagaaagaaagttggtcttacagggtttgactgccgatgtggaaatttgttttgtggacttcaccgttactctgacaagcacaactgtccgtatgattacaaagcagaagctgcagcaaaaatcagaaaagagaatccagttgttgtggctgaaaaaattcagagaatataaattacttcttgtgaagagactgaaactttgtttttattttaatatatcgtaggaaaacattaaagagcagatgcatggccatttttctttgatgttctccagagttttacattacacttgtctgtcttataattgatattttaggatgtttgggtgtttgttacaggcagaattggatagatacagccctacaaatgtatatgccctcccctgaaaaaaattggatgaaaatctgcacagcaaagtgaaacacacagataataggaacaaaatgtagttcccatgtgccaaacaaaataaatgaaatctctgcatgtttgcagcatatctgccttttgggaatgtaatcaaggtataatctttggctagtgttatgtgcctgtatttttttaaaatggtacaccagaaaaggactggcagtctacttctaccatagttaaacttcaccctctttaatttcacaacatattctttggaagcaggaagaaatgctcataaagaggatcagaccttctttcccgtgaaaccagtatttggcgccatatataagcctggttaaattggtcatctaaagctgtcaaataagacattctgtgaaaggtaaacatcgaaactggttataagtaaaaccatcaagccaacaacagggtcttgagataacctttgaagcttattgtactggcctgcaccagaagatgtctgcattactcattgctaaaaatgtgtagcacagaactgcactaggattaatttgtttacaagaagaaatttaaactctacgtttggttttcacatacagcagctctattgaataacatgcatctgaattttaagttgcaaaggtatctgaataatttttcatgtgcatcttttgtcgaatgttttggttcaagaaagaatgtttaaagctttttaaaagacttcagttcttaatgtaactgtacccttctgcatggaaaatcataaccaacatggctgcagtagacttcttagtggtatccagcgccacttgcagagggctgctttatcatattgtacttgggtgtaggactctagtgttcttgggtgtattgcatgggctgcattatctacagcattgtacaataacaactagaaaaggcagtatacttcactgatgcttgtctggtaataatcacttctgtgttataatggaaggttttttgtgatgtatgaaacttgtgttttttatatataaatgagtatagttagtgttgtggtaatgcctgttttcatctgtaaatagttaagtatgtacacgaggcactacttctgatttattgcaatgttcagtcctagtttttacttttattcttaaagcattcagttttgctttcaattttatgtaccttagttctgagttagacctgcagatgtgtacagatagttcatatttatgtattgcacataatcatgctattcagcattgatgctatattgtattatgtaaataataaaagccatgtacagagggaaa

SEQ ID NO: 55 - DNA, 401 bp, Homo sapiens
tttttttttaacgctattttatttttgagatgaagtcttgctatgttgcccaagctggtcttgaactcctgagctcacgtgatctacccaccttggcctctcaaagtgctgggattacaggcgtgagccactgtgcccaacttaaaaaacaggttttgaaagcaagtttgataaagcaatttattacaattttctcttcttcaacaagctattatttcagctctaactctggtcatatacttgtttttggatctctgcttctttttctggcaacatattcaagaatttaaatattcactaggctttatggagcagtaaattcggaataatgtttaaacaaatactcctaaaatatttttcaacaaatgtttgtaaatggatgttgaaagtaagcctgtttt

SEQ ID NO: 56 - DNA, 1078 bp, Homo sapiens
cactcgctggtggtgggtgcgccgtgctgagctctggctgtcagtgtgttcgcccgcgtcccctccgcgctctccgcttgtggataactagctgctggttgatcgcactatgactctggaagaagtccgcggccaggacacagttccggaaagcacagccaggatgcagggtgccgggaaagcgctgcatgagttgctgctgtcggcgcagcgtcagggctgcctcactgccggcgtctacgagtcagccaaagtcttgaacgtggaccccgacaatgtgaccttctgtgtgctggctgcgggtgaggaggacgagggcgacatcgcgctgcagatccattttacgctgatccaggctttctgctgcgagaacgacatcgacatagtgcgcgtgggcgatgtgcagcggctggcggctatcgtgggcgccggcgaggaggcgggtgcgccgggcgacctgcactgcatcctcatttcgaaccccaacgaggacgcctggaaggatcccgccttggagaagctcagcctgttttgcgaggagagccgcagcgttaacgactgggtgcccagcatcaccctccccgagtgacagcccggcggggaccttggtctgatcgacgtggtgacgccccggggcgcctagagcgcggctggctctgtggaggggccctccgagggtgcccgagtgcggcgtggagactggcaggcggggggggcgcctggagagcgaggaggcgcggcctcccgaggaggggcccggtggcggcagggccaggctggtccgagctgaggactctgcaagtgtctggagcggctgctcgcccaggaaggcctaggctaggacgttggcctcagggccaggaaggacagactggccgggcaggcgtgactcagcagcctgcgctcggcaggaaggagcggcgccctggacttggtacagtttcaggagcgtgaaggacttaaccgactgccgctgctttttcaaaacggatccgggcaatgcttcgttttctaaaggatgctgctgttgaagctttgaattttacaataaactttttgaaacaaaaaaaaaaaaaaa

SEQ ID NO: 57 - DNA, 3738 bp, Homo sapiens
ctggcgcgcgcgcgcgccattgtgtggctggactcggccgcccctgtggtgtgaggcgcgtgttcgggctcttgccgtccccgcacccgcaccgcggttactggcttgcggtccgccgttcgacaaccagcccttgggtccccgcccgccacggacatgccgcgcgtctacataggacgcctgagctacaacgtccgggagaaggacatccagcgctttttcagtggctatggccgcctcctcgaagtagacctcaaaaatgggtacggcttcgtggagttcgaggactcccgcgacgccgacgacgccgtttacgagctgaacggcaaggagctctgcggcgagcgcgtgatcgtagagcacgcccggggcccgcgtcgcgatcgcgacggctacagctacggaagccgcagtggtggaggtggatacagcagtcggagaacatctggcagagacaaatacggaccacctgttcgtacagaatacaggcttattgtagaaaatctttctagtcggtgcagttggcaagatttaaaggattttatgcgacaagcaggtgaagtaacctatgcggatgcccacaaggaacgaacaaatgagggtgtaattgagtttcgctcctactctgacatgaagcgtgctttggacaaactggatggcacagaaataaatggcagaaatattaggcttattgaagataagccacgcacaagccataggcgatcttactctggaagcagatccaggtctcgatctagaagacggtcacgaagtaggagtcgcaggagcagccgcagtagatctcgaagtatctcaaaaagtcgctcccgttccaggtcgcggagcaaaggtcgatcacgttctcgatcaaaaggcaggaaatctagatcaaagagcaaatctaagcccaagtctgatcggggctcccattcacattctcgaagcagatctaaggatgagtatgagaaatctcgaagcaggtctcggtcccgatcccccaaagaaaatggaaagggtgatataaagtcaaaatccagatcaaggagccagtcccgttccaattcgccgctacctgttccaccctcaaaggcccgttctgtgtcccctccaccaaaaagagctacttcaagatcccgttctagatctcgctcaaagtcaagatcaaggtccaggtcgagttccagagattaactcagaactccttgtttgcacattattatggaacactttcctacttaggcagttactcttccatgtttatacttggcctcttctgcaagaggaatctcttgaaaacaggggcacacagaaatttgatttgtggccaaattggatgaaaaagatgaggctctaaggaaatggtggcatgaagaccctctcccttctttgtagaattaagataactttgattttatagcttttgagctaacgtaacttttgtaaagattaagctcatttagtgttgttttttttttttttttttttttttttttttagtatttcagcaggatctgctggcagggtttttttgttttatttgtttgcttatttttaaattaactgttttgagctttgaatacttaaggctttagagggagaacccaattttcaattatgttggctttttataaagcttgagttatgtaagatttaaataaaagtttgctaccaagatgattgccttattgaataggtcactattaaattcctttaaatgttgatatctgccatttgtggaaacaacgtaaattctacttaagtgtaaacaaggcaagcctcagaccagcaataaattactcagtttggataacattattttgtgcagttaatcaaatttgccaaagtctttatctgcccctttaacaagttgagtaaaaataaaaggtattttttagtcaatgtgttccatgattttgcttaaattaatacttttaagtaatggaacttttttcaaaggcaaatttaaactatttaagaaatagctcctaatacttgggatcttgtttagagaatccactttctggaagttctcagcataattagtgttgagagtggttcagttgtctttaatgtttgtcatgtggaaatggaagtagcctctttttgttctgaaattgagtttattcaaagtgtaaaagcacatactgcattttctgctgaaagatcattatgtttaacaggcacttaatctcagtaaagtcagttgccagttaagttccacccagtagtcagtcccctttgtagttagtgggattatttgataattggttagatcatacttgtaaattttaatgctttgtgtaattggtttgaaaaacagtgaaatgggtaaacgcaaaacttttgtactttattacgagtaaagtgtaatgagtactgtggaaaccaaatttgaatactgcaaatttgtaggagttactaggttagcaattagtccatacatccataagcctgatgagttgaaattgcagtttgagaagtgaattaaccttacatccctttgttcagataccttaaaagttactttatttaaaagcatttattaatcttagtctgaaatcaaaatatagattaattggctcagctttaatacctttctaggaggtgtcacaatgtagggtaccaagggttggattgtgatggggcatggtcgtacactgctcattgtgccacaggtgtgactggaaagcatgatattctagggttggtttgtagattcaaataatccagaaatatacctaataagattgagtgaaaaatttgagtcaaatatctagggcattcacagagtagctgtgagttcttggtaatgtgaaaaaggccttgtttttcagaaattcctgggtttcctgttaaaaaatcttaaagcccaaccttaggaatatagtgccccaaaaggcggatgcttcttccattatcttattttctttgatactttatttaattagatgtttataaagaaatgggtttatttttccagcataaacctcagaatttaaggaaagaaaatgatgtctgttgttatagttcattgttttgcctactcagcagaagtgatgactcttaaaaattggctttgaccaaagttctcttgttttcagggaaagaacataaaagctttttgaactacagcctttttaaaagagggatgggaggatattacagtaagaaattaggctttctaaaagtatgaaacatccttcaactgggctctcttgttaataggacatcatatggtaatagactggtttgactatattgttagctgccacagtaagcaggtcattgtataggtaaatgcctgcacccataattttctagtaatagccacgaccaatttattaacagtcagggcctatccttgcctgtagttctcagtcactggatgcacaaaatcactgtgtaacattggctcacttggtgagcatagggttgactgataaaatgtttaattcccttgctagcttgtgagaagaatgagttgatgacatgctccataccagtggctagatggagtattaaggtggagcagaaaagaagtgagaacatcttgattcccctttcttttacttgatggtgtttatgaacatgccgtagtgcctttatggccagtttgagtcctgcctactttgacttttacgttcccattcctgtgttaccaccttcctcccgatttgttcacctattttgtgctttaaatctcaataaaatacttactgaggaaaaaaaaaaaaaaaa

SEQ ID NO: 58 - DNA, 3099 bp, Homo sapiens
tgcgaggcagagtgctagcgggagcgcgagccagcaagaggcgcctgcgcgatgtccgggcccctgagcccgcggcgctgagccagccgggacggacatgcgcgggagggcgccgcggggcagccgccgctcctccgggggaatgaaagctactggttgattttaaagtgcctgggcctcacaggtttggagatgtcccagaataaggcacaatgtcaatagcaggagttgctgctcaggagatcagagtcccattaaaaactggatttctacataatggccgagccatggggaatatgaggaagacctactggagcagtcgcagtgagtttaaaaacaactttttaaatattgacccgataaccatggcctacagtctgaactcttctgctcaggagcgcctaataccacttgggcatgcttccaaatctgctccgatgaatggccactgctttgcagaaaatggtccatctcaaaagtccagcttgccccctcttcttattcccccaagtgaaaacttgggaccacatgaagaggatcaagttgtatgtggttttaagaaactcacagtgaatggggtttgtgcttccacccctccactgacacccataaaaaactccccttcccttttcccctgtgcccctctttgtgaacggggttctaggcctcttccaccgttgccaatctctgaagccctctctctggatgacacagactgtgaggtggaattcctaactagctcagatacagacttccttttagaagactctacactttctgatttcaaatatgatgttcctggcaggcgaagcttccgtgggtgtggacaaatcaactatgcatattttgataccccagctgtttctgcagcagatctcagctatgtgtctgaccaaaatggaggtgtcccagatccaaatcctcctccacctcagacccaccgaagattaagaaggtctcattcgggaccagctggctcctttaacaagccagccataaggatatccaactgttgtatacacagagcttctcctaactccgatgaagacaaacctgaggttccccccagagttcccatacctcctagaccagtaaagccagattatagaagatggtcagcagaagttacttcgagcacctatagtgatgaagacaggcctcccaaagtaccgccaagagaacctttgtcaccgagtaactcgcgcacaccgagtcccaaaagccttccgtcttacctcaatggggtcatgcccccgacacagagctttgcccctgatcccaagtatgtcagcagcaaagcactgcaaagacagaacagcgaaggatctgccagtaaggttccttgcattctgcccattattgaaaatgggaagaaggttagttcaacacattattacctactacctgaacgaccaccatacctggacaaatatgaaaaattttttagggaagcagaagaaacaaatggaggcgcccaaatccagccattacctgctgactgcggtatatcttcagccacagaaaagccagactcaaaaacaaaaatggatctgggtggccacgtgaagcgtaaacatttatcctatgtggtttctccttagaccttggggtcatggttcagcagaggttacataggagcaaatggttctcaattttccagtttgattgaagtgcagagaaaaatcccttagattgcaaaataaaatagttgaactctctgtcttcatgtggaaggtttagagcagttgtgagatgctgttatgctgagaaaccctgactttgttagtgttggaaaaaagtcttacaagtctataatttaaagatgtgatggtggggaggggaggatggggaagctttttatatatgcatacattacatacctatatataaacttgtggtataaccatagaccatagctgcaggttaaccaattagttactatcgtagagtaatatatattcagaataataaactcaagctggagaaatgagtcctgatagactgaaaattgagcaaatggaagaagatacagtattgtttagatcagaatcattaaaaaatatttttgtttagtaagtttgaagatttctggcttttaggccttttctattttgttccatttatttttgcaggcaatcttttccatggagggcagggtatccattctttaccatgggtgtacctgcttaggttaaaaatcataccaaggcctcatacttccaggtttcatgttgcgtcttgttgagggagggagagcaggttacttggcaaccatattgtcacctgtacctgtcacacatcttgaaaaataaaacgataatagaactagtgactaattttcccttacagttcctgcttggtcccacccactgaagtagctcatcgtagtgcgggccgtattagaagcagtggggtacgttagactcagatggaaaagtattctaggtgccagtgttaggatgtcagttttacaaaataatgaagcaattagctatgtgattgagagttattgtttggggatgtgtgttgtggttttgcttttttttttttagactgtattaataaacatacaacacaagctggccttgtgttgctggttcctattcagtatttcctggggattgtttgctttttaagtaaaacacttctgacccatagctcagtatgtctgaattccagaggtcacatcagcatctttctgctttgaaaactctcacagctgtggctgcttcacttagatgcagtgagacacatagttggtgttccgattttcacatccttccatgtatttatcttgaagagataagcacagaagagaaggtgctcactaacagaggtacattactgcaatgttctcttaacagttaaacaagctgtttacagtttaaactgctgaatattatttgagctatttaaagcttattatattttagtatgaactaaatgaaggttaaaacatgcttaagaaaaatgcactgatttctgcattatgtgtacagtattggacaaaggattttattcattttgttgcattattttgaatattgtcttttcattttaataaagttataatacttaaaaaaaaaaaaaaaaaaaaaa

SEQ ID NO: 59 - DNA, 2326 bp, Homo sapiens
ccagatcgcagctgaaggatctgttgagcgcttcaggaaaggcggacaggcgacactaacaggtgaagatctcgggagaccatgactaagaaaagaattgctgtgattgggggaggagtgagcgggctctcttccatcaagtgctgcgtagaagaaggcttggaacctgtctgctttgaaaggactgatgacatcggagggctctggaggttccaggaaaatcctgaagaaggaagggccagtatttacaaatcagtgatcatcaatacttctaaagagatgatgtgcttcagtgactatccaatcccagatcattatcccaacttcatgcataatgcccaggtcctggagtatttcaggatgtatgccaaagaatttgaccttctaaagtatattcgatttaagaccactgtgtgcagtgtgaagaagcagcctgattttgccacttcaggccaatgggaagtggtcactgaatctgaagggaaaaaggagatgaatgtctttgatggagtcatggtttgcactggccatcacaccaatgctcatctacctctggaaagcttccctggaattgagaagttcaaagggcagtacttccacagtcgagactataagaacccagagggattcactggaaagagagtcattataattggcattgggaattctggaggggatctggctgtagagattagccaaacagccaagcaggttttcctcagcaccaggagaggggcttggatcctgaatcgtgtaggggactacggatatcctgctgatgtgttgttctcttctcgacttacacattttatatggaagatctgtggccaatcattagcaaacaaatatttggaaaaaaagataaaccaaaggtttgaccatgaaatgtttggcctgaagcctaaacacagagctctgagtcagcatccaaccttaaatgatgacctgccaaatcgtatcatttctggcttggtgaaagtgaaaggaaatgtgaaggaattcacggagacagctgccatatttgaggatggctccagggaggatgacattgatgctgttatctttgccacaggctatagctttgactttccatttctggaagattccgtcaaagtggtcaaaaacaagatacccctgtataaaaaggtcttccctcctaacctggaaaggccaactcttgcaatcataggcttgattcagcccttaggagccattatgcccatttcagagctccaaggacgctgggccactcaggtatttaaaggtctaaagacattgccctcacagagtgaaatgatggcagaaatatctaaagctcaagaggaaattgacaaaaggtatgtggagagccaacgccataccattcagggagactacatagataccatggaagagcttgctgatttggtgggggtcaggcccaatctgctgtctctggccttcactgaccccaagctggcattacacttattactgggaccctgcactccaatccactatcgtgtacagggccctggaaagtgggatggggctcgaaaagctatcctcaccacagatgatcgcatcaggaagcctctgatgacaagagtagttgaaaggagtagttctatgacttcaacaatgacaataggcaagtttatgctagctcttgccttctttgctataattatagcttacttctagttgtcctattgtcactgccctgtttttcattgggaagcttatctacagatgccttcagaatctgacgagattgactctcagtttcatattgcccagaaatctactttaatgtctctttcgaaagcattaattcactttcctttttcctacaatgaaacctgttttccatttgtattaactcatctcccttccactcatgatccgtcactcttccttgtggtaatccctagactgggagctcaggtactcttttagtcatctttgtatgtctttagcagagttcttgacatgtggtaggtgcttaataaatgtttgttgtttatcaaattttatggtagggagagtaagtcagcatcggtataaaatcgcttactccacgtaactcttcttctgatagggtttgattttctattagaagctcaattttagttttttttcatattataactaaatatgtttcctgagagataagagaaataatgttcctacaatagttgtatgtatctaagataagacatatagatgcttaagacattttgtttcacttgctattcactagtgtacttgaaacatggtcatttttagcccttttccttaggaaccatgtctttattttctcaataaagaaattactttcaactca

SEQ ID NO: 60 - DNA, 448 bp, Homo sapiens
tgtgatttttcagattctttaattctgatgctagggactaatttcagaggattgggtaaaatactcaggtttcacaatctctctaaatattcattttacaatgtaagctttaattacttatttgaacaaattgtattattattttatattttaatttataagccaagtttacctgacattttcagatataatatatgctttcaagtctgtttatcttttattattacaattcaaaggtagaagctttatttttttatatccctggaaattattatagtctataaatttttttctataaccttgtaattcctgaaacatttatgaactatatgaaatattgaaagctgctatctaatgttttcccattttacttgtattttttcaccataatatttattactgtttttaattaggatattctatttgttcaatactaagcattttagaa

SEQ ID NO: 61 - DNA, 4559 bp, Homo sapiens
tcgcgggccgaggacgcctctggggcggcaccgcgtcccgagagccccagaagtcggcggggaagtttccccggtggggggcgtttcgggcctcccggacggctctcggccccggagcccggtcgcaggagcgcgggcccgggggcgggaacgcgccgcggccgcctcctcctccccggctcccgcccgcggcggtgttggcggcggcggtggcggcggcggcggcgcttccccggcgcggagcggctttaaaaggcggcactccaccccccggcgcactcgcagctcgggcgccgcgcgagcctgtcgccgctatgcctccgcgcgcgccgcctgcgcccgggccccggccgccgccccgggccgccgccgccaccgacaccgccgcgggcgcggggggcgcggggggcgcggggggcgccggcgggcccgggttccggccgctcgcgccgcgtccctggcgctggctgctgctgctggcgctgcctgccgcctgctccgcgcccccgccgcgccccgtctacaccaaccactgggcggtgcaagtgctgggcggcccggccgaggcggaccgcgtggcggcggcgcacgggtacctcaacttgggccagattggaaacctggaagattactaccatttttatcacagcaaaacctttaaaagatcaaccttgagtagcagaggccctcacaccttcctcagaatggacccccaggtgaaatggctccagcaacaggaagtgaaacgaagggtgaagagacaggtgcgaagtgacccgcaggccctttacttcaacgaccccatttggtccaacatgtggtacctgcattgtggcgacaagaacagtcgctgccggtcggaaatgaatgtccaggcagcgtggaagaggggctacacaggaaaaaacgtggtggtcaccatccttgatgatggcatagagagaaatcaccctgacctggccccaaattatgattcctacgccagctacgacgtgaacggcaatgattatgacccatctccacgatatgatgccagcaatgaaaataaacacggcactcgttgtgcgggagaagttgctgcttcagcaaacaattcctactgcatcgtgggcatagcgtacaatgccaaaataggaggcatccgcatgctggacggcgatgtcacagatgtggtcgaggcaaagtcgctgggcatcagacccaactacatcgacatttacagtgccagctgggggccggacgacgacggcaagacggtggacgggcccggccgactggctaagcaggctttcgagtatggcattaaaaagggccggcagggcctgggctccattttcgtctgggcatctgggaatggcgggagagagggggactactgctcgtgcgatggctacaccaacagcatctacaccatctccgtcagcagcgccaccgagaatggctacaagccctggtacctggaagagtgtgcctccaccctggccaccacctacagcagtggggccttttatgagcgaaaaatcgtcaccacggatctgcgtcagcgctgtaccgatggccacactgggacctcagtctctgcccccatggtggcgggcatcatcgccttggctctagaagcaaacagccagttaacctggagggacgtccagcacctgctagtgaagacatcccggccggcccacctgaaagcgagcgactggaaagtgaacggcgcgggtcataaagttagccatttctatggatttggtttggtggacgcagaagctctcgttgtggaggcaaagaagtggacagcagtgccatcgcagcacatgtgtgtggccgcctcggacaagagacccaggagcatccccttagtgcaggtgctgcggactacggccctgaccagcgcctgcgcggagcactcggaccagcgggtggtctacttggagcacgtggtggttcgcacctccatctcacacccacgccgaggagacctccagatctacctggtttctccctcgggaaccaagtctcaacttctggcaaagaggttgctggatctttccaatgaagggtttacaaactgggaattcatgactgtccactgctggggagaaaaggctgaagggcagtggaccttggaaatccaagatctgccatcccaggtccgcaacccggagaagcaagggaagttgaaagaatggagcctcatactgtatggcacagcagagcacccgtaccacaccttcagtgcccatcagtcccgctcgcggatgctggagctctcagccccagagctggagccacccaaggctgccctgtcaccctcccaggtggaagttcctgaagatgaggaagattacacagctcaatccaccccaggctctgctaatattttacagaccagtgtgtgccatccggagtgtggtgacaaaggctgtgatggccccaatgcagaccagtgcttgaactgcgtccacttcagcctggggagtgtcaagaccagcaggaagtgcgtgagtgtgtgccccttgggctactttggggacacagcagcaagacgctgtcgccggtgccacaaggggtgtgagacctgctccagcagagctgcgacgcagtgcctgtcttgccgccgcgggttctatcaccaccaggagatgaacacctgtgtgaccctctgtcctgcaggattttatgctgatgaaagtcagaaaaattgccttaaatgccacccaagctgtaaaaagtgcgtggatgaacctgagaaatgtactgtctgtaaagaaggattcagccttgcacggggcagctgcattcctgactgtgagccaggcacctactttgactcagagctgatcagatgtggggaatgccatcacacctgcggaacctgcgtggggccaggcagagaagagtgcattcactgtgcgaaaaacttccacttccacgactggaagtgtgtgccagcctgtggtgagggcttctacccagaagagatgccgggcttgccccacaaagtgtgtcgaaggtgtgacgagaactgcttgagctgtgcaggctccagcaggaactgtagcaggtgtaagacgggcttcacacagctggggacctcctgcatcaccaaccacacgtgcagcaacgctgacgagacattctgcgagatggtgaagtccaaccggctgtgcgaacggaagctcttcattcagttctgctgccgcacgtgcctcctggccgggtaagggtgcctagctgcccacagagggcaggcactcccatccatccatccgtccaccttcctccagactgtcggccagagtctgtttcaggagcggcgccctgcacctgacagctttatctccccaggagcagcatctctgagcacccaagccaggtgggtggtggctcttaaggaggtgttcctaaaatggtgatatcctctcaaatgctgcttgttggctccagtcttccgacaaactaacaggaacaaaatgaattctgggaatccacagctctggctttggagcagcttctgggaccataagtttactgaatcttcaagaccaaagcagaaaagaaaggcgcttggcatcacacatcactcttctccccgtgcttttctgcggctgtgtagtaaatctccccggcccagctggcgaaccctgggccatcctcacatgtgacaaagggccagcagtctacctgctcgttgcctgccactgagcagtctggggacggtttggtcagactataaataagataggtttgagggcataaaatgtatgaccactggggccggagtatctatttctacatagtcagctacttctgaaactgcagcagtggcttagaaagtccaattccaaagccagaccagaagattctatcccccgcagcgctctcctttgagcaagccgagctctccttgttaccgtgttctgtctgtgtcttcaggagtctcatggcctgaacgaccacctcgacctgatgcagagccttctgaggagaggcaacaggaggcattctgtggccagccaaaaggtaccccgatggccaagcaattcctctgaacaaaatgtaaagccagccatgcattgttaatcatccatcacttcccattttatggaattgcttttaaaatacatttggcctctgcccttcagaagactcgtttttaaggtggaaactcctgtgtctgtgtatattacaagcctacatgacacagttggatttattctgccaaacctgtgtaggcattttataagctacatgttctaatttttaccgatgttaattattttgacaaatatttcatatattttcattgaaatgcacagatctgcttgatcaattcccttgaatagggaagtaacatttgccttaaattttttcgacctcgtctttctccatattgtcctgctcccctgtttgacgacagtgcatttgccttgtcacctgtgagctggagagaacccagatgttgtttattgaatctacaactctgaaagagaaatcaatgaagcaagtacaatgttaaccctaaattaataaaagagttaacatcccatggcaaaaaa

SEQ ID NO: 62 - DNA, 5723 bp, Homo sapiens
gcagccgccacattcaacaggcagcagcgcagcgggcgcgccgctggggagagcaagcggcccgcggcgtccgtccgtccttccgtccgcggccctgtcagctggagcgcggcgcaggctctgccccggcccggcggctctggccggccgtccagtccgtgcggcggaccccgaggagcctcgatgtggatggccccgcgaagttaagttctgggctcgcgcttccactccgccgcgccttcctcccagtttccgtccgctcgccgcaccggcttcgttcccccaaatctcggaccgtcccttcgcgccccctccccgtccgcccccagtgctgcgttctccccctcttggctctcctgcggctgggggaggggcgggggtcaccatggccgaggcgcctcaggtggtggagatcgacccggacttcgagccgctgccccggccgcgctcgtgcacctggccgctgcccaggccggagtttagccagtccaactcggccacctccagcccggcgccgtcgggcagcgcggctgccaaccccgacgccgcggcgggcctgccctcggcctcggctgccgctgtcagcgccgacttcatgagcaacctgagcttgctggaggagagcgaggacttcccgcaggcgcccggctccgtggcggcggcggtggcggcggcggccgccgcggccgccaccggggggctgtgcggggacttccagggcccggaggcgggctgcctgcacccagcgccaccgcagcccccgccgcccgggccgctgtcgcagcacccgccggtgccccccgccgccgctgggccgctcgcggggcagccgcgcaagagcagctcgtcccgccgcaacgcgtggggcaacctgtcctacgccgacctcatcaccaaggccatcgagagctcggcggagaagcggctcacgctgtcgcagatctacgagtggatggtcaagagcgtgccctacttcaaggataagggtgacagcaacagctcggcgggctggaagaattcaattcgtcataatctgtccctacacagcaagttcattcgtgtgcagaatgaaggaactggaaaaagttcttggtggatgctcaatccagagggtggcaagagcgggaaatctcctaggagaagagctgcatccatggacaacaacagtaaatttgctaagagccgaagccgagctgccaagaagaaagcatctctccagtctggccaggagggtgctggggacagccctggatcacagttttccaaatggcctgcaagccctggctctcacagcaatgatgactttgataactggagtacatttcgccctcgaactagctcaaatgctagtactattagtgggagactctcacccattatgaccgaacaggatgatcttggagaaggggatgtgcattctatggtgtacccgccatctgccgcaaagatggcctctactttacccagtctgtctgagataagcaatcccgaaaacatggaaaatcttttggataatctcaaccttctctcatcaccaacatcattaactgtttcgacccagtcctcacctggcaccatgatgcagcagacgccgtgctactcgtttgcgccaccaaacaccagtttgaattcacccagcccaaactaccaaaaatatacatatggccaatccagcatgagccctttgccccagatgcctatacaaacacttcaggacaataagtcgagttatggaggtatgagtcagtataactgtgcgcctggactcttgaaggagttgctgacttctgactctcctccccataatgacattatgacaccagttgatcctggggtagcccagcccaacagccgggttctgggccagaacgtcatgatgggccctaattcggtcatgtcaacctatggcagccaggcatctcataacaaaatgatgaatcccagctcccatacccaccctggacatgctcagcagacatctgcagttaacgggcgtcccctgccccacacggtaagcaccatgccccacacctcgggtatgaaccgcctgacccaagtgaagacacctgtacaagtgcctctgccccaccccatgcagatgagtgccctggggggctactcctccgtgagcagctgcaatggctatggcagaatgggccttctccaccaggagaagctcccaagtgacttggatggcatgttcattgagcgcttagactgtgacatggaatccatcattcggaatgacctcatggatggagatacattggattttaactttgacaatgtgttgcccaaccaaagcttcccacacagtgtcaagacaacgacacatagctgggtgtcaggctgagggttagtgagcaggttacacttaaaagtacttcagattgtctgacagcaggaactgagagaagcagtccaaagatgtctttcaccaactcccttttagttttcttggttaaaaaaaaaaacaaaaaaaaaaaccctcctttttttcctttcgtcagacttggcagcaaagacatttttcctgtacaggatgtttgcccaatgtgtgcaggttatgtgctgctgtagataaggactgtgccattggaaatttcattacaatgaagtgccaaactcactacaccatataattgcagaaaagattttcagatcctggtgtgctttcaagttttgtatataagcagtagatacagattgtatttgtgtgtgtttttggtttttctaaatatccaattggtccaaggaaagtttatactctttttgtaatactgtgatgggcctcatgtcttgataagttaaacttttgtttgtactacctgttttctgcggaactgacggatcacaaagaactgaatctccattctgcatctccattgaacagccttggacctgttcacgttgccacagaattcacatgagaaccaagtagcctgttatcaatctgctaaattaatggacttgttaaacttttggaaaaaaaaagattaaatgccagctttgtacaggtcttttctatttttttttgtttattttgttatttgcaaatttgtacaaacatttaaatggttctaatttccagataaatgatttttgatgttattgttgggacttaagaacatttttggaatagatattgaactgtaataatgttttcttaaaactagagtctactttgttacatagtcagcttgtaaattttgtggaaccacaggtatttggggcagcattcataattttcattttgtattctaactggattagtactaattttatacatgcttaactggtttgtacactttgggatgctacttagtgatgtttctgactaatcttaaatcattgtaattagtacttgcatattcaacgtttcaggccctggttgggcaggaaagtgatgtatagttatggacactttgcgtttcttatttaggataacttaatatgtttttatgtatgtattttaaagaaatttcatctgcttctactgaactatgcgtactgcatagcatcaagtcttctctagagacctctgtagtcctgggaggcctcataatgtttgtagatcagaaaagggagatctgcatctaaagcaatggtcctttgtcaaacgagggattttgatccacttcaccattttgagttgagctttagcaaaagtttcccctcataattctttgctcttgtttcagtccaggtggaggttggttttgtagttctgccttgaggaattatgtcaacactcatacttcatctcattctcccttctgccctgcagattagattacttagcacactgtggaagtttaagtggaaggagggaatttaaaaatgggacttgagtggtttgtagaatttgtgttcataagttcagatgggtagcaaatggaatagaacttacttaaaaattggggagatttatttgaaaaccagctgtaagttgtgcattgagattatgttaaaagccttggcttaagaatttgaaaatttctttagcctgtagcaacctaaactgtaattcctatcattatgttttattactttccaattacctgtaactgacagaccaaattaattggctttgtgtcctatttagtccatcagtattttcaagtcatgtggaaagcccaaagtcatcacaatgaagagaacaggtgcacagcactgttcctcttgtgttcttgagaaggatctaatttttctgtatatagcccacatcacacttgctttgtcttgtatgttaattgcatcttcattggcttggtatttcctaaatgtttaacaagaacacaagtgttcctgataagatttcctacagtaagccagctgtattgtaagcttcccaccgtgatgatcatttttttgaagattcattgaacagccaccactctatcatcctcattttggggcagtccaagacatagctggttttagaaacccaagttcctctaagcacagcctcccgggtatgtaactgaacttggtgccaaagtacttgtgtactaatttctattactacgtactgtcactttcctcccgtgccattactgcatcataatacaaggaacctcagagcccccatttgttcattaaagaggcaactacagccaaaatcactgttaaaatcttactacttcatggagtagctcttaggaaaatatatcttcctcctgagtctgggtaattatacctctcccaagcccccattgtgtgttgaaatcctgtcatgaatccttggtagctctctgagaacagtgaagtccagggaaaggcatctggtctgtctggaaagcaaacattatgtggcctctggtagtttttttcctgtaagaatactgactttctggagtaatgagtatatatcagttattgtacatgattgctttgtgaaatgtgcaaatgatatcacctatgcagccttgtttgatttattttctctggtttgtactgttattaaaagcatattgtattatagagctattcagatattttaaatataaagatgtattgtttccgtaatatagacgtatggaatatatttaggtaatagatgtattacttggaaagttctgctttgacaaactgacaaagtctaaatgagcacatgtatcccagtgagcagtaaatcaatggaacatcccaagaagaggataaggatgcttaaaatggaaatcattctccaacgatatacaaattggacttgttcaactgctggatatatgctaccaataaccccagccccaacttaaaattcttacattcaagctcctaagagttcttaatttataactaattttaaaagagaagtttcttttctggttttagtttgggaataatcattcattaaaaaaaatgtattgtggtttatgcgaacagaccaacctggcattacagttggcctctccttgaggtgggcacagcctggcagtgtggccaggggtggccatgtaagtcccatcaggacgtagtcatgcctcctgcatttcgctacccgagtttagtaacagtgcagattccacgttcttgttccgatactctgagaagtgcctgatgttgatgtacttacagacacaagaacaatctttgctataattgtataaagccataaatgtacataaattatgtttaaatggcttggtgtctttcttttctaattatgcagaataagctctttattaggaattttttgtgaagctattaaatacttgagttaa

SEQ ID NO: 63 - DNA, 3338 bp, Homo sapiens
gcgcgaggccgtcgattcgctcgcggctccatcgcggcctggccggggggcggtgtctgctgcgccaggttcgctggccgcacgtcttcaggtcctcctgttcctgggaggcgggcgcggcaggactgggaggtggcggcagcgggcgaggactcgccgaggacggggctccggcccgggataaccaactctccttctctcttctttggtgcttccccaggcggcggcggcggcgcccgggagccggagccttcgcggcgtccacgtccctcccccgctgcaccccgccccggcgcgagaggagagcgcgagagccccagccgcgggcgggcgggcggcgaagatggcagaggcaccggcttccccggccccgctctctccgctcgaagtggagctggacccggagttcgagccccagagccgtccgcgatcctgtacgtggcccctgcaaaggccggagctccaagcgagccctgccaagccctcgggggagacggccgccgactccatgatccccgaggaggaggacgatgaagacgacgaggacggcgggggacgggccggctcggccatggcgatcggcggcggcggcgggagcggcacgctgggctccgggctgctccttgaggactcggcccgggtgctggcacccggagggcaagaccccgggtctgggccagccaccgcggcgggcgggctgagcgggggtacacaggcgctgctgcagcctcagcaaccgctgccaccgccgcagccgggggcggctgggggctccgggcagccgaggaaatgttcgtcgcggcggaacgcctggggaaacctgtcctacgcggacctgatcacccgcgccatcgagagctccccggacaaacggctcactctgtcccagatctacgagtggatggtgcgttgcgtgccctacttcaaggataagggcgacagcaacagctctgccggctggaagaactccatccggcacaacctgtcactgcatagtcgattcatgcgggtccagaatgagggaactggcaagagctcttggtggatcatcaaccctgatggggggaagagcggaaaagccccccggcggcgggctgtctccatggacaatagcaacaagtataccaagagccgtggccgcgcagccaagaagaaggcagccctgcagacagcccccgaatcagctgacgacagtccctcccagctctccaagtggcctggcagccccacgtcacgcagcagtgatgagctggatgcgtggacggacttccgttcacgcaccaattctaacgccagcacagtcagtggccgcctgtcgcccatcatggcaagcacagagttggatgaagtccaggacgatgatgcgcctctctcgcccatgctctacagcagctcagccagcctgtcaccttcagtaagcaagccgtgcacggtggaactgccacggctgactgatatggcaggcaccatgaatctgaatgatgggctgactgaaaacctcatggacgacctgctggataacatcacgctcccgccatcccagccatcgcccactgggggactcatgcagcggagctctagcttcccgtataccaccaagggctcgggcctgggctccccaaccagctcctttaacagcacggtgttcggaccttcatctctgaactccctacgccagtctcccatgcagaccatccaagagaacaagccagctaccttctcttccatgtcacactatggtaaccagacactccaggacctgctcacttcggactcacttagccacagcgatgtcatgatgacacagtcggaccccttgatgtctcaggccagcaccgctgtgtctgcccagaattcccgccggaacgtgatgcttcgcaatgatccgatgatgtcctttgctgcccagcctaaccagggaagtttggtcaatcagaacttgctccaccaccagcaccaaacccagggcgctcttggtggcagccgtgccttgtcgaattctgtcagcaacatgggcttgagtgagtccagcagccttgggtcagccaaacaccagcagcagtctcctgtcagccagtctatgcaaaccctctcggactctctctcaggctcctccttgtactcaactagtgcaaacctgcccgtcatgggccatgagaagttccccagcgacttggacctggacatgttcaatgggagcttggaatgtgacatggagtccattatccgtagtgaactcatggatgctgatgggttggattttaactttgattccctcatctccacacagaatgttgttggtttgaacgtggggaacttcactggtgctaagcaggcctcatctcagagctgggtgccaggctgaaggatcactgaggaaggggaagtgggcaaagcagaccctcaaactgacacaagacctacagagaaaaccctttgccaaatctgctctcagcaagtggacagtgataccgtttacagcttaacacctttgtgaatcccacgccattttcctaacccagcagagactgttaatggccccttaccctgggtgaagcacttacccttggaacagaactctaaaaagtatgcaaaatcttccttgtacagggtggtgagccgcctgccagtggaggacagcacccctcagcaccacccaccctcattcagagcacaccgtgagcccccgtcggccattctgtggtgttttaatattgcgatggtttatgggacgttttaagtgttgttcttgtgtttgttttcctttgactttctgagtttttcacatgcattaacttgcggtatttttctgttaaaatgttaaccgtccttcccctagcaaatttaaaaacagaaagaaaatgttgtaccagttaccattccgggttcgagcatcacaagcttttgagcgcatggaactccataaactaacaaattacataaactaaagggggattttctttcttcttttgtttggtagaaaattatccttttctaaaaactgaacaatggcacaattgtttgctatgtgcacccgtccaggacagaaccgtgcataggcaaaaggagtggagcacagcgtccggcccagtgtgtttccggttctgagtcagggtgatctgtggacgggaccccagcaccaagtctacgggtgccagatcagtagggcctgtgatttcctgtcagtgtcctcagctaatgtgaacagtgttggtctgctggttagaaactagaatattgatattttcaggaaagaaatcagctcagctctccactcattgccaaatgtcactaaagggtttagttttaaggagaaagaaaaggaaaaaaaaaaaaaa

SEQ ID NO: 64 - DNA, 2642 bp, Homo sapiens
acttccgggaacgccggggaaccgcagtagccgcctgctagtggcgctgctagccggccggcgcaggctgccgagcgggtgagcgcgcaggccaggccaaagccctggtacccgcgcggtgcgggcctcagtctgcggccatgggggcgtccgcgcggctgctgcgagcggtgatcatgggggccccgggctcgggcaagggcaccgtgtcgtcgcgcatcactacacacttcgagctgaagcacctctccagcggggacctgctccgggacaacatgctgcggggcacagaaattggcgtgttagccaaggctttcattgaccaagggaaactcatcccagatgatgtcatgactcggctggcccttcatgagctgaaaaatctcacccagtatagctggctgttggatggttttccaaggacacttccacaggcagaagccctagatagagcttatcagatcgacacagtgattaacctgaatgtgccctttgaggtcattaaacaacgccttactgctcgctggattcatcccgccagtggccgagtctataacattgaattcaaccctcccaaaactgtgggcattgatgacctgactggggagcctctcattcagcgtgaggatgataaaccagagacggttatcaagagactaaaggcttatgaagaccaaacaaagccagtcctggaatattaccagaaaaaaggggtgctggaaacattctccggaacagaaaccaacaagatttggccctatgtatatgctttcctacaaactaaagttccacaaagaagccagaaagcttcagttactccatgaggagaaatgtgtgtaactattaatagtaagatgggcaaacctcctagtccttgcatttagaagctgcttttcctaagacttctagtatgtatgaattctttgaaaattatattacttttatttctactgattttattttggatactaaggatgtgccaaatgattcggatactaagatgcatcgtttgaaatcatctagtgtgttgtatgcagttatcctcaaaaacatcagcgatgtctgaacctttaaaacatctgttagagcaaaattaaaagagcatttggtagtaatctaactttttgttcagttaataagtggttgataaagtttccatatttttctggaaaagttaaaaaaagttacatgtcatttggagaaaatacgtaatcagaaatttgtgcatagattgatgccaaaaaagacatttccagcattgtggaacatggtgagacactatataaaattccagaaagaaagcaactggatttacagatttattgtgagacacaaattcactgctgcctttacactaagaaatgtatatgttaaccatatatgctgtatttattttgtcgttaagcatactttcagtttactcagaattttcaatttgctataaagatgtatcaattagcatatagaaaaatattactttaagatgacttgtttcctttgaaaatacctgtgtactgagggttatgatttgtgtcaaaaattgacataagtgcttttacaagcaccaaagttgaatgaattttcaacaaaatgtaattaaagtctatgttttcagttatgactcaggttaagaaatgtgttttaggatctacttgctggtttttctttttgatccaaatgtgtgatctgccctgataaataacaagttatagtaccatctcccccgccaataaaaaagagaagaaaaaagagaaacccgtggcactatgtaaataaagtaagcatactttgttgttagtaaatagatgaggcatgcctgggaaatgctcccttggcataaatagcaatcaattataattagtaaacaggtgtaccaataaaaagaatttacatgataggttaacaaggaccaggaaagtgagtttcctgaaggagttctttgttcctgatcaaagaaattgatacctgttagcattcactgccaccatattttaaggagaaagaactctattggtgtcgtctgagcagccatttaaaaattggaatctaaaggatggttgctgatgtactgtgtggtctggtagaagtggggaaatatgagagatggaggaaaaacttgattatgtcttccatggcatatttactcttactttacttcgtgccaaatcaaatgaaacaagccgtcttacaagtcgttattgcctttaaaaatctgttccgtttttttcccaggtacttaaaatacaagtgccagtaagtggttcttatgtgttttggggggaaaattttatttcccttttcttctgatatttaaaaaattcatcgatctttcaagatgaaccaaggttttttaaaagaaatataggaaacacttcattctttataaaactttctataatgccttatttgaatgttaatcttatgtgctttctaaaaaatgttgtgaaataccaaacttatggattatcactaggttatcaagcatatattagtctttatcagaataaaatgaaatttcataactgtggctattactttgttcttggtccttcacagggcctgctccatcccaccttcctttctgctgcctgatgtctcaatggcttctgaatgactgttctaataaatgatcttaaaacagt

SEQ ID NO: 65 - DNA, 6636 bp, Homo sapiens
gtcgacaataacaaaccaagccgcggcggtgtccgcggccctgccgagccctcggcgttgcctcagaatcccccagtcgcctgggcccctcggctctgacaggccgcggccttctgtcccccggccccagacccagagccgaggggcctgctcgcgtccttgtccgcccggacccctccctgcctcctagagttcggggccgcggcgggcgggcgcccgggacgccggcggttgtgtcggcttagcggtgccgaatgggcggttggtaaccgctgccgaggactaggcggcggcggaagatggtgccgggggtcgctggctctgctgctgccgccggcgaaggaggaggcgttgccggttttctgagtttaaccagtaatgccattcagttgccaatctcaagcaaagcaaacataagccagttttaatctactttttaagaaaagtggtagtccttttcacagtgcctgacgtaactgtatcagagggtgaggtataagctcacagaattcagataaatcatcatgaagttatatgtatttctggttaacactggaactactctaacatttgacactgaacttacagtgcaaactgtggcagaccttaagcatgccattcaaagcaaatacaagattgctattcaacaccaggtgctggtggtcaatggaggagaatgcatggctgcagatcgaagagtgtgtacctacagtgctgggacggatacaaatccaatttttctttttaacaaagaaatgatcttatgtgatcgtccacctgctattcctaaaactaccttttcgacagaaaatgacatggaaataaaagttgaagaatctcttatgatgcctgcagtttttcatactgttgcttcaaggacacagcttgcattggaaatgtatgaagttgccaagaaactttgttctttttgtgaaggtcttgtacatgatgaacatcttcaacaccaaggctgggctgcaatcatggccaacctggaggactgttcaaattcataccaaaagctacttttcaagtttgaaagtatttattcaaattatctgcagtccatagaagacatcaagttaaaacttactcatttaggaactgcagtttcagtaatggccaagattccactgttggagtgcctaaccagacatagttacagagaatgtttgggaagactggattctttacctgaacatgaagactcagaaaaagctgagacgaaaagatccactgaactggtgctctctcctgatatgcctagaacaactaacgaatctttgttaacctcatttcccaagtcagtggaacatgtgtccccagataccgcagatgctgaaagtggcaaagaaattagggaatcttgtcaaagtactgttcatcagcaagatgaaactacgattgacactaaagatggtgatctgcccttttttaatgtctctttgttagactggataaatgttcaagatagacctaatgatgtggaatctttggtcaggaagtgctttgattctatgagcaggcttgatccaaggattattcgaccatttatagcagaatgccgtcaaactattgccaaacttgataatcagaatatgaaagccattaaaggacttgaagatcggctctacgccctggaccagatgattgctagctgtggccgactggtgaatgaacagaaagagcttgctcagggatttttagctaatcagaagagagctgaaaacttaaaggatgcatctgtattacctgatttatgcctgagtcacgcaaatcagttgatgattatgttgcaaaatcatagaaaactgttagatattaagcagaagtgtaccactgccaaacaagaactagcaaataacctacatgtcagactgaagtggtgttgctttgtaatgcttcatgctgatcaagatggagagaagttacaagctttgctccgcctcgtaatagagctgttagaaagagtcaaaattgttgaagctcttagtacagttcctcagatgtactgcttagctgttgttgaggttgtaagaagaaaaatgttcataaaacactacagggagtgggctggtgctttagtcaaagatggaaagagattatatgaagcagaaaaatcaaaaagggaatcctttgggaaattatttaggaagtcttttttaagaaatcgtctgtttaggggactggactcctggcccccttccttttgtactcaaaagcctcgaaagtttgactgtgaacttccagatatttcattaaaagatttacagtttctgcaatcattttgtccttcggaagttcagccattcctcagggttcccttactttgtgactttgaacctctacaccagcatgtacttgctctacataatttggtaaaagcagcacaaagtttggatgaaatgtcacagaccattacagatctactgagtgaacaaaaggcatctgtgagtcagacatccccacagtctgcttcttcaccaaggatggaaagtacagcaggaattacaactactacctcaccgagaactcctccaccactgactgttcaggatcccttatgtcctgcagtttgtcccttagaagaattatctccagatagtattgatgcacatacgtttgattttgaaactattccccatccaaacatagaacagactattcaccaagtttctttagacttggattcattagcagaaagtcctgaatcagattttatgtctgctgtgaatgagtttgtaatagaagaaaatttgtcgtctcctaatcctataagtgatccacaaagcccagaaatgatggtggaatcactttattcatcagttatcaatgcgatagacagtagacgaatgcaggatacaaatgtatgtggtaaggaggattttggagatcatacttctctgaatgtccagttggaaagatgtagagttgttgcccaagactctcacttcagtatacaaaccattaaggaagacctttgccactttagaacatttgtacaaaaagaacagtgtgacttctcaaattcattaaaatgtacagcagtagaaataagaaacattattgaaaaagtaaaatgttctctggaaataacactaaaagaaaaacatcaaaaagaactactgtctttaaaaaatgaatatgaaggtaaacttgacggactaataaaggaaactgaagagaatgaaaacaaaattaaaaaattgaagggagagttagtatgccttgaggaggttttacaaaataaagataatgaatttgctttggttaaacatgaaaaagaagctgtaatctgcctgcagaatgaaaaggatcagaagttgttagagatggaaaatataatgcactctcaaaattgtgaaattaaagaactgaagcagtcacgagaaatagtgttagaagacttaaaaaagctccatgttgaaaatgatgagaagttacagttattgagggcagaacttcagtccttggagcaaagtcatctaaaggaattagaggacacacttcaggttaggcacatacaagagtttgagaaggttatgacagaccacagagtttctttggaggaattaaaaaaggaaaaccaacaaataattaatcaaatacaagaatctcatgctgaaattatccaggaaaaagaaaaacagttacaggaattaaaactcaaggtttctgatttgtcagacacgagatgcaagttagaggttgaacttgcgttgaaggaagcagaaactgatgaaataaaaattttgctggaagaaagcagagcccagcagaaggagaccttgaaatctcttcttgaacaagagacagaaaatttgagaacagaaattagtaaactcaaccaaaagattcaggataataatgaaaattatcaggtgggcttagcagagctaagaactttaatgacaattgaaaaagatcagtgtatttccgagttaattagtagacatgaagaagaatctaatatacttaaagctgaattaaacaaagtaacatctttgcataaccaagcatttgaaatagaaaaaaacctaaaagaacaaataattgaactgcagagtaaattggattcagaattgagtgctcttgaaagacaaaaagatgaaaaaattacccaacaagaagagaaatacgaagctattatccagaaccttgagaaagacagacaaaaattggtcagcagccaggagcaagacagagaacagttaattcagaagcttaattgtgaaaaagatgaagctattcagactgccctaaaagaatttaaattggagagagaagttgttgagaaagagttattagaaaaagttaaacatcttgagaatcaaatagcaaaaagtcctgccattgactctaccagaggagattcttcaagcttagttgctgaacttcaagaaaagcttcaggaagaaaaagctaagtttctagaacaacttgaagagcaagaaaaaagaaagaatgaagaaatgcaaaatgttcgaacatctttgattgcggaacaacagaccaattttaacactgttttaacaagagagaaaatgagaaaagaaaacataataaatgatcttagtgataagttgaaaagtacaatgcagcaacaagaacgggataaagatttgatagagtcactttctgaagatcgagctcgtttgcttgaggaaaagaaaaagcttgaagaagaagtcagtaagttgcgtagtagcagttttgttccttcaccatatgtagctacagccccagaactttatggagcttgtgcacctgaactcccaggtgaatcagatagatccgctgtggaaacagcagatgaaggaagagtggattcagcaatggagacaagcatgatgtctgtacaagaaaatattcatatgttgtctgaagaaaaacagcggataatgctgttagaacgaacattgcaattgaaagaagaagaaaataaacggttaaatcaaagactgatgtctcagagcatgtcttcagtatcttcaaggcattctgaaaagatagctattagagattttcaggtgggagatttggtactcatcatcctagacgaacgccatgacaattatgtgttatttactgttagtcctactttatattttctacattcagagtctctacctgccctggatctcaaaccaggtgagggtgcttcaggtgcatctagaagaccctgggtacttggaaaagtaatggaaaaagaatactgtcaagccaaaaaggcacaaaacagatttaaagttcctttggggacaaagttttacagagtgaaagccgtatcatggaataagaaagtataacttatggacaaaattaatacattctatgacatttttttctgatttgtcctgcagtgctcattcatcactccaaaaacagcaggccatctttttatgcaaaagtcagcgtgacaatatacttcactggtgtacatcgtttactttttaactggcttcattttaggaataataaattcatcagaatccttggctgaattaaaatggtttttgttttttggtttttttttttacccagacaactctagaaatgcggaccaaactacttcattttctcaaagggcataccttgtgcattgtggcttatgatgagccatattaattgcctgttaaatatacactagcttgaacttagatgttaaatgttattattaccagcatttgtccttttgtgaaatcagtatcagaatacttgcactctttaacacattctttataaaatgtataaattattcagaactatttaaaataaagaggagtgttattgcatgctgataatcattttgagtttgcctcagtagatactaaagcaaattgtttcagtttttttaaatgccctttgatgtttcaaaaaaaaaaaggaactgtaatttgattgactgattttaagatcagccataagtaatcagcaatcttcaaaagcactttcagtggattggtcatctgggttctaaagggaagagtctgtgctactaaccatttcaaatgcagactcaaaccttcccaacatctttatgactctagaataatcatattgatgaaatcgtaattcatggttgagtttcagaacaaaagatattcattgcacattaaccatttagaggtcatttaaataacaaaatattgtattgtaaaagaactgtacaattttaaaacaataaagatttgaacctgtaaatgtgtgtgccttttaaagaaggatacatttttaatatatttgagtgattgctgggaagtgtgaaaatattgttatgtatcatatcaaagagaaacatgtttattacaaaaatgttctttaactatatactatgtaacagggtaaacagtgttatgtagaatagaattgtgtaaactagatctttagagaagttgccattgagcaaagttatttaaatgagttagttgagttggatgagaattgtttgaggtttgttgctagagaacaataataaaataattctttttcagaaaatatttaatttcttcataaaaataagttaaatatttttttaaatatgtatatctaatagtacaaaatggaataaacatcatagtgtatagaaaactgaatttgacaagttaatgaataaatgaacaaatgatttcaaaa

SEQ ID NO: 66 - DNA, 1793 bp, Homo sapiens
cgcgtccgccccgcgagcacagagcctcgcctttgccgatccgccgcccgtccacacccgccgccagctcaccatggatgatgatatcgccgcgctcgtcgtcgacaacggctccggcatgtgcaaggccggcttcgcgggcgacgatgccccccgggccgtcttcccctccatcgtggggcgccccaggcaccagggcgtgatggtgggcatgggtcagaaggattcctatgtgggcgacgaggcccagagcaagagaggcatcctcaccctgaagtaccccatcgagcacggcatcgtcaccaactgggacgacatggagaaaatctggcaccacaccttctacaatgagctgcgtgtggctcccgaggagcaccccgtgctgctgaccgaggcccccctgaaccccaaggccaaccgcgagaagatgacccagatcatgtttgagaccttcaacaccccagccatgtacgttgctatccaggctgtgctatccctgtacgcctctggccgtaccactggcatcgtgatggactccggtgacggggtcacccacactgtgcccatctacgaggggtatgccctcccccatgccatcctgcgtctggacctggctggccgggacctgactgactacctcatgaagatcctcaccgagcgcggctacagcttcaccaccacggccgagcgggaaatcgtgcgtgacattaaggagaagctgtgctacgtcgccctggacttcgagcaagagatggccacggctgcttccagctcctccctggagaagagctacgagctgcctgacggccaggtcatcaccattggcaatgagcggttccgctgccctgaggcactcttccagccttccttcctgggcatggagtcctgtggcatccacgaaactaccttcaactccatcatgaagtgtgacgtggacatccgcaaagacctgtacgccaacacagtgctgtctggcggcaccaccatgtaccctggcattgccgacaggatgcagaaggagatcactgccctggcacccagcacaatgaagatcaagatcattgctcctcctgagcgcaagtactccgtgtggatcggcggctccatcctggcctcgctgtccaccttccagcagatgtggatcagcaagcaggagtatgacgagtccggcccctccatcgtccaccgcaaatgcttctaggcggactatgacttagttgcgttacaccctttcttgacaaaacctaacttgcgcagaaaacaagatgagattggcatggctttatttgttttttttgttttgttttggttttttttttttttttggcttgactcaggatttaaaaactggaacggtgaaggtgacagcagtcggttggagcgagcatcccccaaagttcacaatgtggccgaggactttgattgcacattgttgtttttttaatagtcattccaaatatgagatgcattgttacaggaagtcccttgccatcctaaaagccaccccacttctctctaaggagaatggcccagtcctctcccaagtccacacaggggaggtgatagcattgctttcgtgtaaattatgtaatgcaaaatttttttaatcttcgccttaatacttttttattttgttttattttgaatgatgagccttcgtgcccccccttccccctttttgtcccccaacttgagatgtatgaaggcttttggtctccctgggagtgggtggaggcagccagggcttacctgtacactgacttgagaccagttgaataaaagtgcacacctta

SEQ ID NO: 67 - DNA, 1339 bp, Homo sapiens
gctgcactgcatggttgctgctggatgtgttgtgttcctggcttccctctggatgctgacagaaacaagggaatttctgctgaagtgacaaggcaagccagagccaaagcaggttggacccagcttgtccccacagagacgtgtgcttccctctctctctgagagcgacctgttaaccgcaaatacctggaaggtctgggacatggagaacgacccctcgagacgaagagagtccatctctctcacacctgtggccaagggtctggagaacatgggggctgatttcttggaaagcctggaggaaggccagctccctaggagtgacttgagccccgcagagatcaggagcagctggagcgaggcggcgccgaagcccttctccagatggaggaacctgcagccagccctgagagccagaagcttctgcagggagcacatgcagctgtttcgatggatcggcacaggcctgctctgcactgggctctctgccttcctgctggtggcctgcctcctggatttccagagggccctggctctgtttgtcctcacctgtgtggtcctcaccttcctgggccaccgcctgctgaaacggcttctggggccaaagctgaggaggtttctcaagcctcagggccatccccgcctgctgctctggtttaagagggatcccaggccatggagcaaggagggcccgaatcagtacctccctcagatcacctggacagtgtgagacaaaaagccgcagggaccatccctggagggggattcagcaggctcgatcggggtccaggtgctggtatttttcattagcctccaggggattctgatgtagccagcagcgtccttggacaacagtttgagatctgctgcttttcaaactggattccttggagcgctggaaatctcagcgatgtcacagggcaggagagggaggttgtggagggaaaattcagacttcccgcccagcccaccatttcaccaggcagctctaaatttatgtgttttataagccaaggttcacacaaaaaagaaaattcgctgggggaaaaaaacagtttctatggcttaaaaaaaagtctgaagaccaccagtctatttcaatactctattttgttgatgaagaagctggtgaccaaagatacccaaagactaagtcagggggatgcaggggtacaggggtgcctctcactttcccaaagtgagatccacataccacagcaaaatgatttgagccagcctgtggatgaacacatttaaaattttatttataaatacatttactgttacatttgacttctctttattaaatacatttgtgatttaaaaaaaaaaaaaaaaa

SEQ ID NO: 68 - DNA, 993 bp, Homo sapiens
attccacgttcttaactgttccattttccgtatctgcttcgggcttccacctcatttttttcgctttgcccattctgtttcagccagtcgccaagaatcatgaaagtcgccagtggcagcaccgccaccgccgccgcgggccccagctgcgcgctgaaggccggcaagacagcgagcggtgcgggcgaggtggtgcgctgtctgtctgagcagagcgtggccatctcgcgctgcgccgggggcgccggggcgcgcctgcctgccctgctggacgagcagcaggtaaacgtgctgctctacgacatgaacggctgttactcacgcctcaaggagctggtgcccaccctgccccagaaccgcaaggtgagcaaggtggagattctccagcacgtcatcgactacatcagggaccttcagttggagctgaactcggaatccgaagttggaacccccgggggccgagggctgccggtccgggctccgctcagcaccctcaacggcgagatcagcgccctgacggccgaggcggcatgcgttcctgcggacgatcgcatcttgtgtcgctgaagcgcctcccccagggaccggcggaccccagccatccagggggcaagaggaattacgtgctctgtgggtctcccccaacgcgcctcgccggatctgagggagaacaagaccgatcggcggccactgcgcccttaactgcatccagcctggggctgaggctgaggcactggcgaggagagggcgctcctctctgcacacctactagtcaccagagactttagggggtgggattccactcgtgtgtttctattttttgaaaagcagacattttaaaaaatggtcacgtttggtgcttctcagatttctgaggaaattgctttgtattgtatattacaatgatcaccgactgaaaatattgttttacaatagttctgtggggctgtttttttgttattaaacaaataatttagatggtgaaaaaaaaaa

SEQ ID NO: 69 - DNA, 1234 bp, Homo sapiens
attccacgttcttaactgttccattttccgtatctgcttcgggcttccacctcatttttttcgctttgcccattctgtttcagccagtcgccaagaatcatgaaagtcgccagtggcagcaccgccaccgccgccgcgggccccagctgcgcgctgaaggccggcaagacagcgagcggtgcgggcgaggtggtgcgctgtctgtctgagcagagcgtggccatctcgcgctgcgccgggggcgccggggcgcgcctgcctgccctgctggacgagcagcaggtaaacgtgctgctctacgacatgaacggctgttactcacgcctcaaggagctggtgcccaccctgccccagaaccgcaaggtgagcaaggtggagattctccagcacgtcatcgactacatcagggaccttcagttggagctgaactcggaatccgaagttggaacccccgggggccgagggctgccggtccgggctccgctcagcaccctcaacggcgagatcagcgccctgacggccgaggtgagatccagatccgaccactagatcatccttataccgacggggaaacggaggccagagagggcgtgggcgcttgcaccacttccgtcccatccttgcgggtacctggctatgcgggggtgcctaaggagcctggaaaaagcgctcccccgtcgtgcttcctggggaagggggcgttcgctgcgctcggagcggcgtcccttccaacccgccggtctcatttcttctcgttttcacaggcggcatgcgttcctgcggacgatcgcatcttgtgtcgctgaagcgcctcccccagggaccggcggaccccagccatccagggggcaagaggaattacgtgctctgtgggtctcccccaacgcgcctcgccggatctgagggagaacaagaccgatcggcggccactgcgcccttaactgcatccagcctggggctgaggctgaggcactggcgaggagagggcgctcctctctgcacacctactagtcaccagagactttagggggtgggattccactcgtgtgtttctattttttgaaaagcagacattttaaaaaatggtcacgtttggtgcttctcagatttctgaggaaattgctttgtattgtatattacaatgatcaccgactgaaaatattgttttacaatagttctgtggggctgtttttttgttattaaacaaataatttagatggtgaaaaaaaaaaaa

SEQ ID NO: 70 - DNA, 1207 bp, Homo sapiens
attgtgtcagaggaagcaaccatgcaggtgctaaccaagcgttaccccaagaactgcctgctgaccgtcatggaccggtatgcagccgaggtgcacaacatggagcaggtggtgatgatccccagccttctgcgggacgtgcagctgagtgggcctgggggccaggcccaggctgaggcccctgatctctacacctacttcaccatgctcaaggccatctgtgtggatgtggaccatgggctgctgccgcgggaggagtggcaggccaaggtggcaggcagcgaagagaatggaaccgcagagacagaggaagtcgaggacgagagtgcctcaggagagctggacctggaagcccagttccacctgcacttctccagcctccatcacatcctcatgcacctcaccgagaaagcccaggaggtgacaaggaaataccaggaaatgacgggacaagtttggtagaccttggacactagggaagatcccttcacatgatagaagacagactctttgatgaggtcggcggagcagttcactagccaatgatgagagcagaaaggcctagacctgcagccagaagtgaaggcggctcagttctccgggatgcttctctacctcctgagcaccaattcctggattccagtcactggctcacctttagaatgtctgttgctattcactgctcccctcgctcctcttaacagcttggggaggtgaccagtggttcaggagggactagacaattacctgtccagtgtggtatggtaggaagagtgtaggtgttggcacgtgaccaaaattcacatccctcctcatggcagtcattcagtatgtgtacttgtacaagttatttaacccattggagcctaaattccctcatctataaaatggggataatattatctacctcacaagcttatgaaaactaaacatgatgaatcaaaagcacttggcatgtgagggctattaaaatagcctgattttttttttctccccctctccccaatgtatttgctctggcccttgctttttaccctccagagctaagaggtagcagagtctcttgggatgagtgattcaccctcttacttggcgaccactgatgagatcaacaacaggtgaactataaacctattatttattgcagaactaataaaaaatccaaagccttgtaaaaaaaaaaaaaaaaaaaaaaaaaaaaaaaaaa

SEQ ID NO: 71 - DNA, 1042 bp, Homo sapiens
cgattccgcacgtcccttacccgcttcactagtcccggcattcttcgctgttttcctaactcgcccgcttgactagcgccctggaacagccatttgggtcgtggagtgcgagcacggccggccaatcgccgagtcagagggccaggaggggcgcggccattcgccgcccggcccctgctccgtggctggttttctccgcgggcgcctcgggcggaacctggagataatgggcagcacctgggggagccctggctgggtgcggctcgctctttgcctgacgggcttagtgctctcgctctacgcgctgcacgtgaaggcggcgcgcgcccgggaccgggattaccgcgcgctctgcgacgtgggcaccgccatcagctgttcgcgcgtcttctcctccaggtggggcaggggtttcgggctggtggagcatgtgctgggacaggacagcatcctcaatcaatccaacagcatattcggttgcatcttctacacactacagctattgttaggttgcctgcggacacgctgggcctctgtcctgatgctgctgagctccctggtgtctctcgctggttctgtctacctggcctggatcctgttcttcgtgctctatgatttctgcattgtttgtatcaccacctatgctatcaacgtgagcctgatgtggctcagtttccggaaggtccaagaaccccagggcaaggctaagaggcactgagccctcaacccaagccaggctgacctcatctgctttgctttggcatgtgagccttgcctaagggggcatatctgggtccctagaaggccctagatgtggggcttctagattaccccctcctcctgccatacccgcacatgacaatggaccaaatgtgccacacgctcgctcttttttacacccagtgcctctgactctgtccccatgggctggtctccaaagctctttccattgcccagggagggaaggttctgagcaataaagtttcttagatcaatcaaaaaaaaaaaaaaaaaaaaaaaaaaaaaaaaaaaaaaaaaaaaa

SEQ ID NO: 72 - DNA, 907 bp, Homo sapiens
cgattccgcacgtcccttacccgcttcactagtcccggcattcttcgctgttttcctaactcgcccgcttgactagcgccctggaacagccatttgggtcgtggagtgcgagcacggccggccaatcgccgagtcagagggccaggaggggcgcggccattcgccgcccggcccctgctccgtggctggttttctccgcgggcgcctcgggcggaacctggagataatgggcagcacctgggggagccctggctgggtgcggctcgctctttgcctgacgggcttagtgctctcgctctacgcgctgcacgtgaaggcggcgcgcgcccgggaccgggattaccgcgcgctctgcgacgtgggcaccgccatcagctgttcgcgcgtcttctcctccaggttgcctgcggacacgctgggcctctgtcctgatgctgctgagctccctggtgtctctcgctggttctgtctacctggcctggatcctgttcttcgtgctctatgatttctgcattgtttgtatcaccacctatgctatcaacgtgagcctgatgtggctcagtttccggaaggtccaagaaccccagggcaaggctaagaggcactgagccctcaacccaagccaggctgacctcatctgctttgctttggcatgtgagccttgcctaagggggcatatctgggtccctagaaggccctagatgtggggcttctagattaccccctcctcctgccatacccgcacatgacaatggaccaaatgtgccacacgctcgctcttttttacacccagtgcctctgactctgtccccatgggctggtctccaaagctctttccattgcccagggagggaaggttctgagcaataaagtttcttagatcaatcaaaaaaaaaaaaaaaaaaaa

SEQ ID NO: 73 - DNA, 4450 bp, Homo sapiens
agccgatgggggcggggaaaagtccggctgggccgggacaaaagccggatcccgggaagctaccggctgctggggtgctccggattttgcggggttcgtcgggcctgtggaagaagcgccgcgcacggacttcggcagaggtagagcaggtctctctgcagccatgtcggccaaggcaatttcagagcagacgggcaaagaactcctttacaagttcatctgtaccacctcagccatccagaatcggttcaagtatgctcgggtcactcctgacacagactgggcccgcttgctgcaggaccacccctggctgctcagccagaacttggtagtcaagccagaccagctgatcaaacgtcgtggaaaacttggtctcgttggggtcaacctcactctggatggggtcaagtcctggctgaagccacggctgggacaggaagccacagttggcaaggccacaggcttcctcaagaactttctgatcgagcccttcgtcccccacagtcaggctgaggagttctatgtctgcatctatgccacccgagaaggggactacgtcctgttccaccacgaggggggtgtggacgtgggtgatgtggacgccaaggcccagaagctgcttgttggcgtggatgagaaactgaatcctgaggacatcaaaaaacacctgttggtccacgcccctgaagacaagaaagaaattctggccagttttatctccggcctcttcaatttctacgaggacttgtacttcacctacctcgagatcaatccccttgtagtgaccaaagatggagtctatgtccttgacttggcggccaaggtggacgccactgccgactacatctgcaaagtgaagtggggtgacatcgagttccctccccccttcgggcgggaggcatatccagaggaagcctacattgcagacctcgatgccaaaagtggggcaagcctgaagctgaccttgctgaaccccaaagggaggatctggaccatggtggccgggggtggcgcctctgtcgtgtacagcgataccatctgtgatctagggggtgtcaacgagctggcaaactatggggagtactcaggcgcccccagcgagcagcagacctatgactatgccaagactatcctctccctcatgacccgagagaagcacccagatggcaagatcctcatcattggaggcagcatcgcaaacttcaccaacgtggctgccacgttcaagggcatcgtgagagcaattcgagattaccagggccccctgaaggagcacgaagtcacaatctttgtccgaagaggtggccccaactatcaggagggcttacgggtgatgggagaagtcgggaagaccactgggatccccatccatgtctttggcacagagactcacatgacggccattgtgggcatggccctgggccaccggcccatccccaaccagccacccacagcggcccacactgcaaacttcctcctcaacgccagcgggagcacatcgacgccagcccccagcaggacagcatctttttctgagtccagggccgatgaggtggcgcctgcaaagaaggccaagcctgccatgccacaagattcagtcccaagtccaagatccctgcaaggaaagagcaccaccctcttcagccgccacaccaaggccattgtgtggggcatgcagacccgggccgtgcaaggcatgctggactttgactatgtctgctcccgagacgagccctcagtggctgccatggtctaccctttcactggggaccacaagcagaagttttactgggggcacaaagagatcctgatccctgtcttcaagaacatggctgatgccatgaggaagcatccggaggtagatgtgctcatcaactttgcctctctccgctctgcctatgacagcaccatggagaccatgaactatgcccagatccggaccatcgccatcatagctgaaggcatccctgaggccctcacgagaaagctgatcaagaaggcggaccagaagggagtgaccatcatcggacctgccactgttggaggcatcaagcctgggtgctttaagattggcaacacaggtgggatgctggacaacatcctggcctccaaactgtaccgcccaggcagcgtggcctatgtctcacgttccggaggcatgtccaacgagctcaacaatatcatctctcggaccacggatggcgtctatgagggcgtggccattggtggggacaggtacccgggctccacattcatggatcatgtgttacgctatcaggacactccaggagtcaaaatgattgtggttcttggagagattgggggcactgaggaatataagatttgccggggcatcaaggagggccgcctcactaagcccatcgtctgctggtgcatcgggacgtgtgccaccatgttctcctctgaggtccagtttggccatgctggagcttgtgccaaccaggcttctgaaactgcagtagccaagaaccaggctttgaaggaagcaggagtgtttgtgccccggagctttgatgagcttggagagatcatccagtctgtatacgaagatctcgtggccaatggagtcattgtacctgcccaggaggtgccgcccccaaccgtgcccatggactactcctgggccagggagcttggtttgatccgcaaacctgcctcgttcatgaccagcatctgcgatgagcgaggacaggagctcatctacgcgggcatgcccatcactgaggtcttcaaggaagagatgggcattggcggggtcctcggcctcctctggttccagaaaaggttgcctaagtactcttgccagttcattgagatgtgtctgatggtgacagctgatcacgggccagccgtctctggagcccacaacaccatcatttgtgcgcgagctgggaaagacctggtctccagcctcacctcggggctgctcaccatcggggatcggtttgggggtgccttggatgcagcagccaagatgttcagtaaagcctttgacagtggcattatccccatggagtttgtgaacaagatgaagaaggaagggaagctgatcatgggcattggtcaccgagtgaagtcgataaacaacccagacatgcgagtgcagatcctcaaagattacgtcaggcagcacttccctgccactcctctgctcgattatgcactggaagtagagaagattaccacctcgaagaagccaaatcttatcctgaatgtagatggtctcatcggagtcgcatttgtagacatgcttagaaactgtgggtcctttactcgggaggaagctgatgaatatattgacattggagccctcaatggcatctttgtgctgggaaggagtatggggttcattggacactatcttgatcagaagaggctgaagcaggggctgtatcgtcatccgtgggatgatatttcatatgttcttccggaacacatgagcatgtaacagagccaggaaccctactgcagtaaactgaagacaagatctcttcccccaagaaaaagtgtacagacagctggcagtggagcctgctttatttagcaggggcctggaatgtaaacagccactggggtacaggcaccgaagaccaacatccacaggctaacaccccttcagtccacacaaagaagcttcatattttttttataagcatagaaataaaaaccaagccaatatttgtgactttgctctgctacctgctgtatttattatatggaagcatctaagtactgtcaggatggggtcttcctcattgtagggcgttaggatgttgctttctttttccattagttaaacatttttttctcctttggaggaagggaatgaaacatttatggcctcaagatactatacatttaaagcaccccaatgtctctctttttttttttttacttccctttcttcttccttatataacatgaagaacattgtattaatctgatttttaaagatctttttgtatgttacgtgttaagggcttgtttggtatcccactgaaatgttctgtgttgcagaccagagtctgtttatgtcagggggatggggccattgcatccttagccattgtcacaaaatatgtggagtagtaacttaatatgtaaagttgtaacatacatacatttaaaatggaaatgcagaaagctgtgaaatgtcttgtgtcttatgttctctgtatttatgcagctgatttgtctgtctgtaactgaagtgtgggtccaaggactcctaactactttgcatctgtaatccacaaagattctgggcagctgccacctcagtctcttctctgtattatcatagtctggtttaaataaactatatagtaacaaaaaaaaaaaaaaaaaaaaaaaaaaaaaaaaaaaaaaaaaaaaaaaaaaaaaaaaaaaaaaaaaaaaaaaaaaaaaaaaaaaaaaaaaaaaaaaaaaa

SEQ ID NO: 74 - DNA, 4420 bp, Homo sapiens
agccgatgggggcggggaaaagtccggctgggccgggacaaaagccggatcccgggaagctaccggctgctggggtgctccggattttgcggggttcgtcgggcctgtggaagaagcgccgcgcacggacttcggcagaggtagagcaggtctctctgcagccatgtcggccaaggcaatttcagagcagacgggcaaagaactcctttacaagttcatctgtaccacctcagccatccagaatcggttcaagtatgctcgggtcactcctgacacagactgggcccgcttgctgcaggaccacccctggctgctcagccagaacttggtagtcaagccagaccagctgatcaaacgtcgtggaaaacttggtctcgttggggtcaacctcactctggatggggtcaagtcctggctgaagccacggctgggacaggaagccacagttggcaaggccacaggcttcctcaagaactttctgatcgagcccttcgtcccccacagtcaggctgaggagttctatgtctgcatctatgccacccgagaaggggactacgtcctgttccaccacgaggggggtgtggacgtgggtgatgtggacgccaaggcccagaagctgcttgttggcgtggatgagaaactgaatcctgaggacatcaaaaaacacctgttggtccacgcccctgaagacaagaaagaaattctggccagttttatctccggcctcttcaatttctacgaggacttgtacttcacctacctcgagatcaatccccttgtagtgaccaaagatggagtctatgtccttgacttggcggccaaggtggacgccactgccgactacatctgcaaagtgaagtggggtgacatcgagttccctccccccttcgggcgggaggcatatccagaggaagcctacattgcagacctcgatgccaaaagtggggcaagcctgaagctgaccttgctgaaccccaaagggaggatctggaccatggtggccgggggtggcgcctctgtcgtgtacagcgataccatctgtgatctagggggtgtcaacgagctggcaaactatggggagtactcaggcgcccccagcgagcagcagacctatgactatgccaagactatcctctccctcatgacccgagagaagcacccagatggcaagatcctcatcattggaggcagcatcgcaaacttcaccaacgtggctgccacgttcaagggcatcgtgagagcaattcgagattaccagggccccctgaaggagcacgaagtcacaatctttgtccgaagaggtggccccaactatcaggagggcttacgggtgatgggagaagtcgggaagaccactgggatccccatccatgtctttggcacagagactcacatgacggccattgtgggcatggccctgggccaccggcccatccccaaccagccacccacagcggcccacactgcaaacttcctcctcaacgccagcgggagcacatcgacgccagcccccagcaggacagcatctttttctgagtccagggccgatgaggtggcgcctgcaaagaaggccaagcctgccatgccacaaggaaagagcaccaccctcttcagccgccacaccaaggccattgtgtggggcatgcagacccgggccgtgcaaggcatgctggactttgactatgtctgctcccgagacgagccctcagtggctgccatggtctaccctttcactggggaccacaagcagaagttttactgggggcacaaagagatcctgatccctgtcttcaagaacatggctgatgccatgaggaagcatccggaggtagatgtgctcatcaactttgcctctctccgctctgcctatgacagcaccatggagaccatgaactatgcccagatccggaccatcgccatcatagctgaaggcatccctgaggccctcacgagaaagctgatcaagaaggcggaccagaagggagtgaccatcatcggacctgccactgttggaggcatcaagcctgggtgctttaagattggcaacacaggtgggatgctggacaacatcctggcctccaaactgtaccgcccaggcagcgtggcctatgtctcacgttccggaggcatgtccaacgagctcaacaatatcatctctcggaccacggatggcgtctatgagggcgtggccattggtggggacaggtacccgggctccacattcatggatcatgtgttacgctatcaggacactccaggagtcaaaatgattgtggttcttggagagattgggggcactgaggaatataagatttgccggggcatcaaggagggccgcctcactaagcccatcgtctgctggtgcatcgggacgtgtgccaccatgttctcctctgaggtccagtttggccatgctggagcttgtgccaaccaggcttctgaaactgcagtagccaagaaccaggctttgaaggaagcaggagtgtttgtgccccggagctttgatgagcttggagagatcatccagtctgtatacgaagatctcgtggccaatggagtcattgtacctgcccaggaggtgccgcccccaaccgtgcccatggactactcctgggccagggagcttggtttgatccgcaaacctgcctcgttcatgaccagcatctgcgatgagcgaggacaggagctcatctacgcgggcatgcccatcactgaggtcttcaaggaagagatgggcattggcggggtcctcggcctcctctggttccagaaaaggttgcctaagtactcttgccagttcattgagatgtgtctgatggtgacagctgatcacgggccagccgtctctggagcccacaacaccatcatttgtgcgcgagctgggaaagacctggtctccagcctcacctcggggctgctcaccatcggggatcggtttgggggtgccttggatgcagcagccaagatgttcagtaaagcctttgacagtggcattatccccatggagtttgtgaacaagatgaagaaggaagggaagctgatcatgggcattggtcaccgagtgaagtcgataaacaacccagacatgcgagtgcagatcctcaaagattacgtcaggcagcacttccctgccactcctctgctcgattatgcactggaagtagagaagattaccacctcgaagaagccaaatcttatcctgaatgtagatggtctcatcggagtcgcatttgtagacatgcttagaaactgtgggtcctttactcgggaggaagctgatgaatatattgacattggagccctcaatggcatctttgtgctgggaaggagtatggggttcattggacactatcttgatcagaagaggctgaagcaggggctgtatcgtcatccgtgggatgatatttcatatgttcttccggaacacatgagcatgtaacagagccaggaaccctactgcagtaaactgaagacaagatctcttcccccaagaaaaagtgtacagacagctggcagtggagcctgctttatttagcaggggcctggaatgtaaacagccactggggtacaggcaccgaagaccaacatccacaggctaacaccccttcagtccacacaaagaagcttcatattttttttataagcatagaaataaaaaccaagccaatatttgtgactttgctctgctacctgctgtatttattatatggaagcatctaagtactgtcaggatggggtcttcctcattgtagggcgttaggatgttgctttctttttccattagttaaacatttttttctcctttggaggaagggaatgaaacatttatggcctcaagatactatacatttaaagcaccccaatgtctctctttttttttttttacttccctttcttcttccttatataacatgaagaacattgtattaatctgatttttaaagatctttttgtatgttacgtgttaagggcttgtttggtatcccactgaaatgttctgtgttgcagaccagagtctgtttatgtcagggggatggggccattgcatccttagccattgtcacaaaatatgtggagtagtaacttaatatgtaaagttgtaacatacatacatttaaaatggaaatgcagaaagctgtgaaatgtcttgtgtcttatgttctctgtatttatgcagctgatttgtctgtctgtaactgaagtgtgggtccaaggactcctaactactttgcatctgtaatccacaaagattctgggcagctgccacctcagtctcttctctgtattatcatagtctggtttaaataaactatatagtaacaaaaaaaaaaaaaaaaaaaaaaaaaaaaaaaaaaaaaaaaaaaaaaaaaaaaaaaaaaaaaaaaaaaaaaaaaaaaaaaaaaaaaaaaaaaaaaaaaaa

SEQ ID NO: 75 - DNA, 2129 bp, Homo sapiens
gatgagcaatgagggaataatccccattccgtctggaatcagagggcgggcctgccgcggaggcatctgggaaacggagttcccaggcaggcgaagcccaggggccgtcaggaagtcagcggcgcctgcgcgggcgcctcagattcaggatgcgcgcgcagcgctctccgcccagcggaagttttcgctgggcaactgagaaggtgagtccgggtaactgcggaggatccgagggtcaggctgcagaagcccagaatcccaccccagtccccaagtacagaggtcgctgtcaagatggagtttccaacccagtaaatccaagggccagaccgtgacctcataaagcatgatctccttctgtccagactgtggcaaaagtatccaagcggcattcaaattctgcccctactgtggaaattctttgcctgtagaggagcatgtagggtcccagacctttgtcaatccacatgtgtcatccttccaaggctcaaagagagggctgaactccagttttgaaacctctcctaagaaagtgaaatggtccagcaccgtcacctctccccgattatccctcttctcagatggtgacagttctgagtctgaagatactctgagttcctctgagagatccaaaggctccgggagcagacccccaacccccaaaagcagccctcagaagaccaggaagagccctcaggtgaccaggggtagccctcagaagaccagctgtagccctcagaagaccaggcagagccctcagacgctgaagcggagccgagtgaccacctcacttgaagctttgcccacagggacagtgctgacagacaagagtgggcgacagtggaagctgaagtccttccagaccagggacaaccagggcattctctatgaagctgcacccacctccaccctcacctgtgactcaggaccacagaagcaaaagttctcactcaaactggatgccaaggatgggcgcttgttcaatgagcagaacttcttccagcgggccgccaagcctctgcaagtcaacaagtggaagaagctgtactcgaccccactgctggccatccctacctgcatgggtttcggtgttcaccaggacaaatacaggttcttggtgttacccagcctggggaggagccttcagtcggccctggatgtcagcccaaagcatgtgctgtcagagaggtctgtgctgcaggtggcctgccggctgctggatgccctggagttcctccatgagaatgagtatgttcatggaaatgtgacagctgaaaatatctttgtggatccagaggaccagagtcaggtgactttggcaggctatggcttcgccttccgctattgcccaagtggcaaacacgtggcctacgtggaaggcagcaggagccctcacgagggggaccttgagttcattagcatggacctgcacaagggatgcgggccctcccgccgcagcgacctccagagcctgggctactgcatgctgaagtggctctacgggtttctgccatggacaaattgccttcccaacactgaggacatcatgaagcaaaaacagaagtttgttgataagccggggcccttcgtgggaccctgcggtcactggatcaggccctcagagaccctgcagaagtacctgaaggtggtgatggccctcacgtatgaggagaagccgccctacgccatgctgaggaacaacctagaagctttgctgcaggatctgcgtgtgtctccatatgaccccattggcctcccgatggtgccctaggtggaatccagaactttccatttgcagtgtgcaacagaaaaaaaaaaatgaagtaatgtgactcaaggcctgctgtttaatcacagataagcttctagaacaagccctggaatgtgcattcctgccactggtttcaggatactcatcagtcctgattagcctcccggagggccccagtttccctcccgtgaatgtgaagttccccatcttggtggcctgcccttcagccagtgtcctagcaaagctggatggggttgggccggcccacaggggggacccctcctacccttgacacctctgtgctttggtaataaattgttttaccagagaaaaaaaaaaaaaaaaaaaaaaaaaaaaa

SEQ ID NO: 76 - DNA, 1400 bp, Homo sapiens; identical to SEQ ID NO: 22

SEQ ID NO: 77 - DNA, 2210 bp, Homo sapiens
agcagctcagtgcaacggtgtgaactcagcctgtttcagagcctccacaccatgacctccaagaagctggtgaactcggtggctggctgtgctgatgacgctcttgctggcctggtggcctgcaaccccaacctgcagctcctgcagggccaccgcgtggccctccgttctgacctggacagcctcaagggccgggtggcactgctgtcgggtgggggctctggccatgagcctgcccatgctggtttcatagggaaggggatgctgactggggtcatcgcgggagctgtgttcacctccccggcagtgggcagcatcctggcagccatcagggccgtggcccaggccggcacagtggggacgctccttatcgtgaagaactacactggggatcggctcaacttcggcctggcccgggagcaggcccgggctgaaggcatcccggtggagatggtggtgattggggacgacagcgccttcactgtcctgaagaaggcaggccggcgggggctgtgcggcacggtgcttatacacaaggtggcaggtgctctggctgaggctggtgtggggctggaggagatcgcaaagcaggtgaacgtggtcgccaaggccatgggtaccctgggggtgagcttatcctcctgcagcgtccctggttccaaacccaccttcgagctctcagccgacgaggtggagctgggcctggggatccacggggaagctggtgtgcgccggataaagatggcaaccgccgatgagattgtgaaactcatgctcgaccacatgacaaacaccaccaacgcgtcccatgtgcctgtgcagcccggctcctcagttgtgatgatggtcaacaacctgggtggcctgtcattcctggaactgggcatcatagccgacgctaccgtccgctccctggagggccgcggggtgaagattgcccgtgccctggtgggcaccttcatgtcagcactggagatgcctggcatttctctcaccctcctgctggtggatgagcctctcctgaaactgatagatgctgaaaccactgcagcagcctggcctaacgtggctgcagtctccattactgggcggaagcggagccgggtagcccctgccgagccccaggaggcccctgattccactgctgcaggaggctcagcctcgaagcggatggcgctggtgctggaacgggtgtgcagcactctcctgggcctggaggaacacctgaatgccctggaccgggctgctggtgacggcgactgtggcaccacccacagccgtgcggccagagcaatccaggagtggctgaaggagggcccaccccctgccagccctgcccagctgctctccaagttgtctgtcctgctcctggagaagatgggaggctcatctggggcgctctatggcctgttcctgactgcggctgcacagcccctgaaggccaagaccagcctcccagcctggtctgctgccatggatgccggcctggaagccatgcagaagtatggcaaggctgctccaggggacaggactatgctggattctctgtgggcagcggggcaggagctccaagcctggaagagcccaggagctgatctgttacaagtcctgaccaaagcagtcaagagtgccgaagctgcagccgaggccaccaagaatatggaagctggagccggaagagccagttatatcagctcagcacggctggagcagccagaccccggggcggtggcagctgctgccatcctccgggccatcttggaggtcttgcagagctagggtgtgtgactgcctcccttggcctcagctcctctcactgctgtgctgaggtggcctttgtcacttccttctgccttccaaccctcaccttcccccggcctggccccattggcccaccctctaagttgagcaggaaatcctccaccaagcttccagaactacagacagcacccagagtgagctggagtgggtccccatgcctctccagcatgccctttccctttgcaggagggtggagtccctgggtcatgccctcccctgccagctctgggcttcagagataaggcattttccttgtgcagcctttacctggcaatcctaatttggttttaagactccctgtgaaatgctttccgcaccttaaccccagtgagcgtgaaaaagaaagttaataaactataatacatggaagcaagaaaaaaaaaaaaaaa

SEQ ID NO: 78 - DNA, 576 bp, Homo sapiens; identical to SEQ ID NO: 27

SEQ ID NO: 79 - DNA, 1121 bp, Homo sapiens
ctagctctgtgggaaggttttgggctctctggctcggattttgcaatttctccctggggactgccgtggagccgcatccactgtggattataattgcaacatgacgctggaagagctcgtggcgtgcgacaacgcggcgcagaagatgcagacggtgaccgccgcggtggaggagcttttggtggccgctcagcgccaggatcgcctcacagtgggggtgtacgagtcggccaagttgatgaatgtggacccagacagcgtggtcctctgcctcttggccattgacgaggaggaggaggatgacatcgccctgcaaatccacttcacgctcatccagtccttctgctgtgacaacgacatcaacatcgtgcgggtgtcgggcaatgcgcgcctggcgcagctcctgggagagccggccgagacccagggcaccaccgaggcccgagacctccactgtcttcccttcctacagaaccctcacacggacgcctggaagagccacggcttggtggaggtggccagctactgcgaagaaagccggggcaacaaccagtgggtcccctacatctctcttcaggaacgctgaggcccttcccagcagcagaatctgttgagttgctgccaacaaacaaaaaatacaataaatatttgaaccccctcccccccagcacaacccccccaaaacaacccaacccacgaggaccatcgggggcaggtcgttggagactgaagagaaagagagagaggagaagggagtgaggggccgctgccgccttccccatcacggagggtccagactgtccactcgggggtggagtgagactgactgcaagccccaccctccttgagactggagctgagcgtctgcatacgagagacttggttgaaacttggttggtccttgtctgcaccctcgacaagaccacactttgggacttgggagctggggctgaagttgctctgtacccatgaactcccagtttgcgaattaataagagacaatctattttgttacttgcacttgttattcgaaccactgagagcgagatgggaagcatagatatctatatttttatttctactatgagggccttgtaataaatttctaaagcctcaaaaaa

SEQ ID NO: 80 - DNA, 2986 bp, Homo sapiens
gcgccccagtcgacgctgagctcctctgctactcagagttgcaacctcagcctcgctatggctcccagcagcccccggcccgcgctgcccgcactcctggtcctgctcggggctctgttcccaggacctggcaatgcccagacatctgtgtccccctcaaaagtcatcctgccccggggaggctccgtgctggtgacatgcagcacctcctgtgaccagcccaagttgttgggcatagagaccccgttgcctaaaaaggagttgctcctgcctgggaacaaccggaaggtgtatgaactgagcaatgtgcaagaagatagccaaccaatgtgctattcaaactgccctgatgggcagtcaacagctaaaaccttcctcaccgtgtactggactccagaacgggtggaactggcacccctcccctcttggcagccagtgggcaagaaccttaccctacgctgccaggtggagggtggggcaccccgggccaacctcaccgtggtgctgctccgtggggagaaggagctgaaacgggagccagctgtgggggagcccgctgaggtcacgaccacggtgctggtgaggagagatcaccatggagccaatttctcgtgccgcactgaactggacctgcggccccaagggctggagctgtttgagaacacctcggccccctaccagctccagacctttgtcctgccagcgactcccccacaacttgtcagcccccgggtcctagaggtggacacgcaggggaccgtggtctgttccctggacgggctgttcccagtctcggaggcccaggtccacctggcactgggggaccagaggttgaaccccacagtcacctatggcaacgactccttctcggccaaggcctcagtcagtgtgaccgcagaggacgagggcacccagcggctgacgtgtgcagtaatactggggaaccagagccaggagacactgcagacagtgaccatctacagctttccggcgcccaacgtgattctgacgaagccagaggtctcagaagggaccgaggtgacagtgaagtgtgaggcccaccctagagccaaggtgacgctgaatggggttccagcccagccactgggcccgagggcccagctcctgctgaaggccaccccagaggacaacgggcgcagcttctcctgctctgcaaccctggaggtggccggccagcttatacacaagaaccagacccgggagcttcgtgtcctgtatggcccccgactggacgagagggattgtccgggaaactggacgtggccagaaaattcccagcagactccaatgtgccaggcttgggggaacccattgcccgagctcaagtgtctaaaggatggcactttcccactgcccatcggggaatcagtgactgtcactcgagatcttgagggcacctacctctgtcgggccaggagcactcaaggggaggtcacccgcgaggtgaccgtgaatgtgctctccccccggtatgagattgtcatcatcactgtggtagcagccgcagtcataatgggcactgcaggcctcagcacgtacctctataaccgccagcggaagatcaagaaatacagactacaacaggcccaaaaagggacccccatgaaaccgaacacacaagccacgcctccctgaacctatcccgggacagggcctcttcctcggccttcccatattggtggcagtggtgccacactgaacagagtggaagacatatgccatgcagctacacctaccggccctgggacgccggaggacagggcattgtcctcagtcagatacaacagcatttggggccatggtacctgcacacctaaaacactaggccacgcatctgatctgtagtcacatgactaagccaagaggaaggagcaagactcaagacatgattgatggatgttaaagtctagcctgatgagaggggaagtggtgggggagacatagccccaccatgaggacatacaactgggaaatactgaaacttgctgcctattgggtatgctgaggcccacagacttacagaagaagtggccctccatagacatgtgtagcatcaaaacacaaaggcccacacttcctgacggatgccagcttgggcactgctgtctactgaccccaacccttgatgatatgtatttattcatttgttattttaccagctatttattgagtgtcttttatgtaggctaaatgaacataggtctctggcctcacggagctcccagtccatgtcacattcaaggtcaccaggtacagttgtacaggttgtacactgcaggagagtgcctggcaaaaagatcaaatggggctgggacttctcattggccaacctgcctttccccagaaggagtgatttttctatcggcacaaaagcactatatggactggtaatggttcacaggttcagagattacccagtgaggccttattcctcccttccccccaaaactgacacctttgttagccacctccccacccacatacatttctgccagtgttcacaatgacactcagcggtcatgtctggacatgagtgcccagggaatatgcccaagctatgccttgtcctcttgtcctgtttgcatttcactgggagcttgcactattgcagctccagtttcctgcagtgatcagggtcctgcaagcagtggggaagggggccaaggtattggaggactccctcccagctttggaagggtcatccgcgtgtgtgtgtgtgtgtatgtgtagacaagctctcgctctgtcacccaggctggagtgcagtggtgcaatcatggttcactgcagtcttgaccttttgggctcaagtgatcctcccacctcagcctcctgagtagctgggaccataggctcacaacaccacacctggcaaatttgattttttttttttttttcagagacggggtctcgcaacattgcccagacttcctttgtgttagttaataaagctttctcaactgcc

SEQ ID NO: 81 - DNA, 1113 bp, Homo sapiens
gggagaggaacagggccctggagcacctggtttcggggacagtagggttggtgggagttgcgatgatattgccacctacctcttacatcttttagtgcgtatgttctgtccacccagctactggttcatttgagtagatcggagtcagatgagtacatgtttacgggaggcgcttggttacgggatccagataggaatctttatctgagctgcttgtcagtttgttcgtctgtccctaggtctgtctgctatcagctatgccgctgcccgttgcgctgcagacccgcttggccaagagaggcatcctcaaacatctggagcctgaaccagaggaagagatcattgccgaggactatgacgatgatcctgtggactacgaggccaccaggttggagggcctaccaccaagctggtacaaggtgttcgacccttcctgcgggctcccttactactggaatgcagacacagaccttgtatcctggctctccccacatgaccccaactccgtggttaccaaatcggccaagaagctcagaagcagtaatgcagatgctgaagaaaagttggaccggagccatgacaagtcggacaggggccatgacaagtcggaccgcagccatgagaaactagacaggggccacgacaagtcagaccggggccacgacaagtctgacagggatcgagagcgtggctatgacaaggtagacagagagagagagcgagacagggaacgggatcgggaccgcgggtatgacaaggcagaccgggaagagggcaaagaacggcgccaccatcgccgggaggagctggctccctatcccaagagcaagaaggcagtaagccgaaaggatgaagagttagaccccatggaccctagctcatactcagacgccccccggggcacgtggtcaacaggactccccaagcggaatgaggccaagactggcgctgacaccacagcagctgggcccctcttccagcagcggccgtatccatccccaggggctgtgctccgggccaatgcagaggcctcccgaaccaagcagcaggattgaagcttcggcctccctggccctgggttaaaataaaagctttctggtgatcctgcccacc

SEQ ID NO: 82 - DNA, 1144 bp, Homo sapiens
atgccgctgcccgttgcgctgcagacccgcttggccaagagaggcatcctcaaacatctggagcctgaaccagaggaagagatcattgccgaggactatgacgatgatcctgtggactacgaggccaccaggttggagggcctaccaccaagctggtacaaggtgttcgacccttcctgcgggctcccttactactggaatgcagacacagaccttgtatcctggctctccccacatgaccccaactccgtggttaccaaatcggccaagaagctcagaagcagtaatgcagatgctgaagaaaagttggaccggagccatgacaagtcggacaggggccatgacaagtcggaccgcagccatgagaaactagacaggggccacgacaagtcagaccggggccacgacaagtctgacagggatcgagagcgtggctatgacaaggtagacagagagagagagcgagacagggaacgggatcgggaccgcgggtatgacaaggcagaccgggaagagggcaaagaacggcgccaccatcgccgggaggagctggctccctatcccaagagcaagaagggtaagctgggcagaatggggctcggtgagaccaacaaggtgcagggtgcactgcgtgaggaagccttccctcaaaaagatgcctggacctggggctagaggagggtgctgtggtacatggcagccaggggcttcatttcttcttgtggggtggggctcagtgatcaggggctcctggtgcctctattgaagactttgccctgccacttccacagcagtaagccgaaaggatgaagagttagaccccatggaccctagctcatactcagacgccccccggtaagtgacaacccctcttgactcagtacgtggacaccatcctccggcctccttcctccattcctcattgggaccaggtgggctgtgtccgccacatcacccatccccatcccctgactctttcaccggcaggggcacgtggtcaacaggactccccaagcggaatgaggccaagactggcgctgacaccacagcagctgggcccctcttccagcagcggccgtatccatccccaggggctgtgctccgggccaatgcagaggcctcccgaaccaagcagcaggattga

SEQ ID NO: 83 - DNA, 2029 bp, Homo sapiens
tggctggcaatggccttgctgacctcgagccgggcccacgtggggacctttggagcacagcctacgatcctggtgcaaggccggtggatgcagaggccagtccatataccacccaggcctgcgaggagcgtggtccccacccatccagcccatatgtgcaagtgcccttgacagagaggctggtcatatccatggtgaccatttatgggccacaacaggtccccatctgcgcagtgaaccctgtgctgagcaccttgcagacgtgatcttgcttcgtcctgcagcactgtgcggggcaggaaaatccaagaggaagaaggatctacggatatcctgcatgtccaagccacccgcacccaaccccacacccccccggaacctggactcccggaccttcatcaccattggagacagaaactttgaggtggaggctgatgacttggtgaccatctcagaactgggccgtggagcctatggggtggtagagaaggtgcggcacgcccagagcggcaccatcatggccgtgaagcggatccgggccaccgtgaactcacaggagcagaagcggctgctcatggacctggacatcaacatgcgcacggtcgactgtttctacactgtcaccttctacggggcactattcagagagggagacgtgtggatctgcatggagctcatggacacatccttggacaagttctaccggaaggtgctggataaaaacatgacaattccagaggacatccttggggagattgctgtgtctatcgtgcgggccctggagcatctgcacagcaagctgtcggtgatccacagagatgtgaagccctccaatgtccttatcaacaaggagggccatgtgaagatgtgtgactttggcatcagtggctacttggtggactctgtggccaagacgatggatgccggctgcaagccctacatggcccctgagaggatcaacccagagctgaaccagaagggctacaatgtcaagtccgacgtctggagcctgggcatcaccatgattgagatggccatcctgcggttcccttacgagtcctgggggaccccgttccagcagctgaagcaggtggtggaggagccgtccccccagctcccagccgaccgtttctcccccgagtttgtggacttcactgctcagtgcctgaggaagaaccccgcagagcgtatgagctacctggagctgatggagcaccccttcttcaccttgcacaaaaccaagaagacggacattgctgccttcgtgaaggagatcctgggagaagactcataggggctgggcctcggaccccactccggccctccagagccccacagccccatctgcgggggcagtgctcacccacaccataagctactgccatcctggcccagggcatctgggaggaaccgagggggctgctcccacctggctctgtggcgagccatttgtcccaagtgccaaagaagcagaccattggggctcccagccaggcccttgtcggccccaccagtgcctctccctgctgctcctaggacccgtctccagctgctgagatcctggactgagggggcctggatgccccctgtggatgctgctgcccctgcacagcaggctgccagtgcctgggtggatgggccaccgccttgcccagcctggatgccatccaagttgtatatttttttaatctctcgactgaatggactttgcacactttggcccagggtggccacacctctatcccggctttggtgcggggtacacaagaggggatgagttgtgtgaataccccaagactcccatgagggagatgccatgagccgcccaaggccttcccctggcactggcaaacagggcctctgcggagcacactggctcacccagtcctgcccgccaccgttatcggtgtcattcacctttcgtgttttttttaatttatcctctgttgattttttcttttgctttatgggtttggcttgtttttcttgcatggtttggagctgatcgcttctcccccaccccctaggg

SEQ ID NO: 84 - DNA, 2024 bp, Homo sapiens
agcgcagttcggccggggtctccccggcgctgcccagtctgtctccggcgccgcccgtcgcggactcgtccttgctgcagtcgccgccgcagtcctcgccgcagtcgccgccgccgccgccgccgccgccgctgctcctccgcctggcctgggccgtctgcccgcagccatgagcgtgctcggccccggtggagcccgcagtcctctagattagtctccaccgccgtccaggacccacttgcagcatggagtcgcccgcctcgagccagcccgccagcatgccccagtccaaaggaaaatccaagaggaagaaggatctacggatatcctgcatgtccaagccacccgcacccaaccccacacccccccggaacctggactcccggaccttcatcaccattggagacagaaactttgaggtggaggctgatgacttggtgaccatctcagaactgggccgtggagcctatggggtggtagagaaggtgcggcacgcccagagcggcaccatcatggccgtgaagcggatccgggccaccgtgaactcacaggagcagaagcggctgctcatggacctggacatcaacatgcgcacggtcgactgtttctacactgtcaccttctacggggcactattcagagagggagacgtgtggatctgcatggagctcatggacacatccttggacaagttctaccggaaggtgctggataaaaacatgacaattccagaggacatccttggggagattgctgtgtctatcgtgcgggccctggagcatctgcacagcaagctgtcggtgatccacagagatgtgaagccctccaatgtccttatcaacaaggagggccatgtgaagatgtgtgactttggcatcagtggctacttggtggactctgtggccaagacgatggatgccggctgcaagccctacatggcccctgagaggatcaacccagagctgaaccagaagggctacaatgtcaagtccgacgtctggagcctgggcatcaccatgattgagatggccatcctgcggttcccttacgagtcctgggggaccccgttccagcagctgaagcaggtggtggaggagccgtccccccagctcccagccgaccgtttctcccccgagtttgtggacttcactgctcagtgcctgaggaagaaccccgcagagcgtatgagctacctggagctgatggagcaccccttcttcaccttgcacaaaaccaagaagacggacattgctgccttcgtgaaggagatcctgggagaagactcataggggctgggcctcggaccccactccggccctccagagccccacagccccatctgcgggggcagtgctcacccacaccataagctactgccatcctggcccagggcatctgggaggaaccgagggggctgctcccacctggctctgtggcgagccatttgtcccaagtgccaaagaagcagaccattggggctcccagccaggcccttgtcggccccaccagtgcctctccctgctgctcctaggacccgtctccagctgctgagatcctggactgagggggcctggatgccccctgtggatgctgctgcccctgcacagcaggctgccagtgcctgggtggatgggccaccgccttgcccagcctggatgccatccaagttgtatatttttttaatctctcgactgaatggactttgcacactttggcccagggtggccacacctctatcccggctttggtgcggggtacacaagaggggatgagttgtgtgaataccccaagactcccatgagggagatgccatgagccgcccaaggccttcccctggcactggcaaacagggcctctgcggagcacactggctcacccagtcctgcccgccaccgttatcggtgtcattcacctttcgtgttttttttaatttatcctctgttgattttttcttttgctttatgggtttggcttgtttttcttgcatggtttggagctgatcgcttctcccccaccccctaggg

SEQ ID NO: 85 - DNA, 2191 bp, Homo sapiens
atgaagcccctctacagtggctgctgcaggtgctggctggaccccgctgggccccttctcaccccacatcccattgattgattagtcaggcagggcagtgaggacacctcacagatggggaaactgaagcccagggaggtactcaagatgtgcccagtgcgggctgagataaggccctggagtccacctccaggctgggtctgtcctgctctgctccctgcagggctggtgggcctccttcccccttttgactaacggcctggcttggagagagggggctcccggcatgggtgatggcagaggctggcacccttgtggccagggcctgatggctcatgggagtgcaggggacattgatgtcaagggatagccagacgcctcaccttctctccattctatgggagtgcaggggacattgatgtcaagggatagccagacgcctcaccttctctccattctaggaaaatccaagaggaagaaggatctacggatatcctgcatgtccaagccacccgcacccaaccccacacccccccggaacctggactcccggaccttcatcaccattggagacagaaactttgaggtggaggctgatgacttggtgaccatctcagaactgggccgtggagcctatggggtggtagagaaggtgcggcacgcccagagcggcaccatcatggccgtgaagcggatccgggccaccgtgaactcacaggagcagaagcggctgctcatggacctggacatcaacatgcgcacggtcgactgtttctacactgtcaccttctacggggcactattcagagagggagacgtgtggatctgcatggagctcatggacacatccttggacaagttctaccggaaggtgctggataaaaacatgacaattccagaggacatccttggggagattgctgtgtctatcgtgcgggccctggagcatctgcacagcaagctgtcggtgatccacagagatgtgaagccctccaatgtccttatcaacaaggagggccatgtgaagatgtgtgactttggcatcagtggctacttggtggactctgtggccaagacgatggatgccggctgcaagccctacatggcccctgagaggatcaacccagagctgaaccagaagggctacaatgtcaagtccgacgtctggagcctgggcatcaccatgattgagatggccatcctgcggttcccttacgagtcctgggggaccccgttccagcagctgaagcaggtggtggaggagccgtccccccagctcccagccgaccgtttctcccccgagtttgtggacttcactgctcagtgcctgaggaagaaccccgcagagcgtatgagctacctggagctgatggagcaccccttcttcaccttgcacaaaaccaagaagacggacattgctgccttcgtgaaggagatcctgggagaagactcataggggctgggcctcggaccccactccggccctccagagccccacagccccatctgcgggggcagtgctcacccacaccataagctactgccatcctggcccagggcatctgggaggaaccgagggggctgctcccacctggctctgtggcgagccatttgtcccaagtgccaaagaagcagaccattggggctcccagccaggcccttgtcggccccaccagtgcctctccctgctgctcctaggacccgtctccagctgctgagatcctggactgagggggcctggatgccccctgtggatgctgctgcccctgcacagcaggctgccagtgcctgggtggatgggccaccgccttgcccagcctggatgccatccaagttgtatatttttttaatctctcgactgaatggactttgcacactttggcccagggtggccacacctctatcccggctttggtgcggggtacacaagaggggatgagttgtgtgaataccccaagactcccatgagggagatgccatgagccgcccaaggccttcccctggcactggcaaacagggcctctgcggagcacactggctcacccagtcctgcccgccaccgttatcggtgtcattcacctttcgtgttttttttaatttatcctctgttgattttttcttttgctttatgggtttggcttgtttttcttgcatggtttggagctgatcgcttctcccccaccccctaggg

SEQ ID NO: 86 - DNA, 1968 bp, Homo sapiens
acagaaggcggggccagcgccgctgccgggtgctggaggcgccattggagccggcttggctggcgagcccggctgaggagcctcttgggtcgcacttaccgccgcgtccgctcccggtccctggcccctcagcggcatggcgtgcggggcgacgctgaagcggcccatggagttcgaggcggcgctgctgagccccggctccccgaagcggcggcgctgcgcccctctgcccggccccactccgggcctcaggcccccggacgccgagccgccgccgccgtttcagacgcagaccccaccgcagagtctgcagcagcccgccccgcccggcagcgagcggcgccttccaactccggagcaaatttttcagaacataaaacaagaatatagtcgttatcagaggtggagacatttagaagttgttcttaatcagagtgaagcttgtgcttcggaaagtcaacctcactcctcagcactcacagcacctagctctccaggttcctcatggatgaagaaggaccagcccacatttaccctccgacaagttggcataatatgtgagcgcctcttaaaagactatgaagataaaattcgggaggagtatgagcaaatcctcaataccaaactagcagaacaatatgaatcttttgtgaaattcacacatgatcagattatgcgacggtatgggacaaggccaacaagctatgtgtcatgaagctttgtcacatatctgggtatcaggtttgacctcaagagatggccgctgtacactttttgcaactggtttgatgtcacatttcagctccaactttgcatcctgagaacacttaaacgtttctgcaggtccattttatacaacttgaaagaccgtaaaactttctggttgccacaagcatatctttcttttctgctcatccaataaacagctgtgccctactgtgatagattttccaaacaaaaatacctggagcagcagtttagcaaaatatgccttcagtggcattcaacaaatggagtttccccaagcacagttctgtaagaagtgcgtgtgagagtgtgtgtatatgtgtgtatgtgtattttaagttattatttgtattgtgcaaaaattttttttttgatcttggggattctggctgtgaatttggtgcacgacaattatggtaaaaaaacatttgcttggtctaaagaagatcattaatgttttgtgaccatacaagttgtaacagtggattgtttttatgtgtaggtattgttaaatacagggactgtttccaggcacagaatatgaatcgtaagttaggatggacattagatgtgattatgatgataaagcgaaggtctgcggtcctgtatctacagacacgtggtgagaaattagaacaaactggagacgggccattgacacatggactctgcctgggcatgttaggttaattctttgactccaagccttaaaatactcacatggagtcagcgctcacctcattcacacaattatcatagagctccctggacactgaacctctaaagggaaaaggtctaccctggagccaggagcatcagggttggcttgggagcatgagaggtgagcccagggctaggcctgggccaggccccggcagcactgctacttgggaggagccacttcacctttgtattagttattaaaaaatataatttgggctgggcgcagtggctcacgcctgtaatcccagcactttgggagtccgaggcatgcggatcacttgaggtcaggagttcgagaccaccctggccaatatggtgaaaccccatctctactaaaaatacaacaaagttagccgggcgtggtggcaggcgtctgtaatcccagctgcttgggaggctgaggcagtagaatcacttgaaccctggaggtggcggttgcagtgagcacagatcatgccactgcactccagcctgggcaacaaaacgagacttcgtctc

SEQ ID NO: 87 - DNA, 1023 bp, Homo sapiens; identical to SEQ ID NO: 26

SEQ ID NO: 88 - DNA, 1977 bp, Homo sapiens
gcccttcgggacgagctggaggcagagcgtgagtacaaagtgatcggcctcggccgcacgtagtagcccccctactccccggccaagtcagggcctccctcttcccgcggagtcgcaaccacgggtagctcgtgtaggtaacggcaggtccaggcctccgcatgagcggagggccccccgcgcgaccttgaatggcccgggcgcgcgcggtcgtgtgggagttgtagtcctccgtccccgtccgcgcggactccgtttcccgtggtgccccgggcggcccgcttccggcgcagttagttacgagtcggcgcacgcggcctcggtccggttgactttgcggagccatggagggcggcttcggctccgatttcgggggctccggcagcgggaagctggacccagggctcataatggagcaggtgaaagtgcagatcgccgtggccaacgcgcaggagctgctgcagaggatgacggacaagtgtttccggaagtgtatagggaaacctgggggctccctggacaactccgagcagaagtgcatcgccatgtgcatggaccgctacatggacgcctggaacaccgtgtctcgcgcctacaactcgcggctgcagcgggaacgagccaacatgtgaccggcgagcgcgggccaccccaccctgttcatttccataaacgtgctttgagaggcggggtccgcatgtacgtactgcctgcccggggcttaggagggtggcaccggtgctgggacacacgggactgtgtcctcgccaccccccgccctgccccctgccagccagtgcagcttggatctcgggggtgtggggccctgtgccttcctgaagtgctggcagcccagtggcacctccttcaggcctttggggtattcccctagtgtgcccaagtcagcctcatattctgggcggacagcttgtctggacttcggagttgggggtggtcagacaccacaggagctgtcacctcctgcggatgggcaaataaattggtggaggacggagagaaacctctttatttccctcctgaggggtctctgggaagaggtgacgcgtgtccctggaaccccagctcggagggtctcagcctcccctgggttgggagaagtccatctttccccttagtgccaccgggctgctgagtcacgaggaatgtgttgctgctgccacccctgccccaaaggctaagggggacagccttccccttgtcagggcttgctttgaccctgcttcgttccaccccgggtcctggtggagcaccaggcaggtggtcctcgctgtgacactgaggtgctgagccagtgagctagggtggaggggctgtgtttattggaacaaagggtggtaccaaaatgcatccccatgacccacagcccccccacacccgtccttgggtagggtacggtggggtggggtgttgggtggcctgctgctcctgttgctttcacgtagagtctcggcctgggcagtcacgtggtggtcactcctggatgtgctgtcctatccagcctctcacagctgccacccgggtatagacacctgggaagtggggccggccacagccatagccccagctagtgaccccagttagcacccaccgtccagagggctccctgcaggccaggggtcccccagcgtcaccctgttggggagagaagaaagggggttcagaggccggtacctcccctacagcagcccttgggtcattggcccctctaggagtgaccctagtgacttcccctgggagccgcattttcactatctggaaaatgggctcaatgcaaaggtggcagacatttatggacacccgccacgtggtcccggagtggaacggtgcctcccactgcagcctctgcctgctctgccgccgaggcccggggatgggatgcggtgggttgcccaataaacggctgtggagtggaaattcctccagagccaaaaaggcaaaaaaaaaaaaaaaaaaaaa

SEQ ID NO: 89 - DNA, 387 bp, Homo sapiens
tttttcaagtaattttatggtataatatcaaagcttgatatagttaatacatttcatctaatataggaatgagaatgcttataaagcagacgtcattttatgtaccattacaaatacactgccaattaaacagactttctcaacaaaagactgttgttgacgaggtcacttccattagacacacaaaatggtttgtttttgttttcatttgtttttgttttttgagacaaggtctcgctctgtcgcccaggctaaatgcagtggcctgagaatgataatgtgcctgcttgtccatttcctgtgttgtttccactgcgttaacaaaagagccttaaaacacaaagcactggccgggcccagtggctcacgcctgtaattccagcactt

SEQ ID NO: 90 - DNA, 6930 bp, Homo sapiens
aatgttcttaaattattcctgatttttttttaaccaagctgccaagaaaagaacgtattcccctcttagtcctattctaatttttatgtgagtgaatctaaactgctgaggaaaaccatatgtgattgttaaattatatatatctatatttttactccgcgcaaggcttattcttctacatccatagatgcttgagaagctctgtttttgtcattcatgtacattttcctttggaaaaagaaagcgcctattttactaaccaaagacttgatttttaccctcttcatttttattccctcctaaaaataagcccaattggatccaagtcaatgttttaagagatttttttaagagttgttttttctttcagagaccagaattccaaatcagaacaatttaaggtgataagctgcgatctttgagctagctataaataagacatttcaagcaagcaagcaaacaacttaaatttggggtagaggaaaaaaaaggcgtgagacatcaggttgtcattttttattgtgagattctgctcctaaaaataataaatgggggattacgggtttggagtgctagtgcaaagcaatactgggaataaatctgcttttccagtcagattccatccacatctgcagcctccacaccatcaccaaaatgccacccccagccctgctgcttttataaataataacacagctgccaatggcagcagtgctgggtcagcttggctttttcctgctccagctacccataacattcaggatgagatcttggggtcagaaaaagcaaaaagtcagcaacaggaacagcaagaccccttagaaaagcagcagctttccccaagtccaggtcaggaagctggaatactgcctgaaacagagaaggcaaaatcagaagaaaatcaaggggacaattcttcggaaaatggcaatgggaaggagaaaataaggatcgaatctccagtgttgacagggtttgattatcaagaagccactgggctaggtacttcaacccaacccttgacatctagcgcatcgtctcttactggtttcagtaactggtcagcagcgatagcgccttcctcctctacaataatcaatgaagatgcaagtttctttcaccagggaggggtccctgctgcttcggctaataacggtgctctgttgtttcaaaatttcccccatcatgtcagccctggctttggaggcagcttctctcctcagatcgggcttctctcacagcaccacccacatcaccctcatttccagcatcatcacagccagcatcagcagcaaaggaggtctcctgccagtccccatcccccacccttcacacatagaaatgctgcttttaaccagctgcctcatttggcgaataatcttaacaaacccccctctccgtggagcagctaccagagtccgtcaccaacaccctcctcttcctggagcccgggcggtggtggatatggtggctggggaggttcccaaggccgagatcaccgcagagggctgaatggtggaataacgcccctgaactccatctcgcctttgaagaaaaattttgcaagcaatcatattcagctccagaagtatgctcgccccagctctgcctttgcacctaaatcctggatggaagatagcttgaacagggctgacaacatttttccttttccggatcgccccaggacattcgacatgcactcactggagagttcactcattgacataatgagagctgaaaatgataccattaaaggtcgtctaaactattcatatccaggatccgatagctctctgcttattaatgcaaggacatatgggcgaaggagaggtcagtcttcactgtttccaatggaagatggattcttggatgatggccgtggggatcagcctcttcatagtggcctgggttcacctcactgcttcagtcaccagaatggggaaagagtggaacgatattctcgaaaggtgtttgtaggcggattgcctccagacattgatgaagatgagatcacagctagttttcgtcgctttggccctctgattgtggattggcctcataaagctgagagcaaatcctattttcctcctaaaggctatgcattcctgctgtttcaagatgaaagctctgtgcaggctctcattgatgcatgcattgaagaagatggaaaactctacctttgtgtatcaagtcccactatcaaggataagccagtccagattcggccttggaatctcagtgacagcgactttgtgatggatggttcacagccacttgacccacgaaaaactatatttgttggtggtgttcctcgaccattacgagctgtggagcttgcgatgataatggatcggctatatggaggtgtgtgctacgctgggattgataccgaccctgagctaaaatacccaaaaggagctgggagagttgcgttctctaatcaacagagttacatagctgctatcagtgcccgctttgttcagctgcagcatggagagatagataaacgggtggaagttaagccatatgtcttggatgatcagctgtgtgatgaatgtcagggggcccgttgtggggggaaatttgctccatttttctgtgctaatgttacctgtctgcagtattactgtgaatattgctgggctgctatccattctcgtgctggcagggaattccacaagcccctggtgaaggaaggcggtgaccgccctcggcatatttcattccgctggaactaaaggataactgcagtgctcattttcaggcctcagaataagtgcactcttctgttcattctgaccccttcctcaacctcttcacgctggcatgtccttttgtagcagtctgtaacttaactatagtataatgaaaagaatgacctataatataggtgttttgtagattcttgtgtcactgcaaacaatatgaactcctttttcgtattgccatcgggttgcatggaagttttattctcttgttttgctggaaaccaagaggatccaaacttcctgcaacattttcttagaggagagagagaaatattaaaagagaaatgaaacaatagagtattttgggtttttaattaaattattgttaataatataacatataagaatacttttattaaaataaccatgcaacaataacactatcggtctatctgacagtttttcccccagggaagtgcttttgccttttcctttctatttttttttttttttcatcttttttgtctctctcttttttccatccctttttaatttttttaacagcaatggaggaagttaacaatttttaatggaaagagcatgttagagcaaacaaatgcataagcaagactgagcagcattataattaattttcagggttttgaggctgaacataatttcattatccctcaaaaagttaccaccacatcagaaaaaataaaaaaaaaatagtaaagtaggcagagctaggtttattttctcttaaacaatttttaaaattcagaatgtaaaaattgggtaaatttactactgaggggagtgcacttatttatttaacttacttatctggtcaaagccccaggaaacctaccaaagctagaattaatgacaactggtgggaaacctagcatttcctctcctgaagaataaatgtataaatgttatttttgatgtttatatataaactctatatcctaatttactaatactcatcagatgtcagcctttgctctccattttgacgttaaaaaacaacaacagatctagagatacctcaaggatatcatttttgattttgtgttacagtacacttgtagccaaaactggaagacaaaaccaatatataatttggctgctgattggcttacttttagatttaaagttactttgggtatcctgtaatttagttgtaacatagaaaatgaaaaaacagttaaaaaaagtgaagtagttgcaaagtgttttgcactgttgaactaagtaactgtgtaaatctgtgcaaaggtacgtatgtttatcttactcttcctataaactaaaataacattacagtttccgaatttagcatgggacatagtcagtgtttgaagtgccaacttcatcaagtaatgcatgctttattataaataaaattctagctttgaaaggcgttatgtgttgaacagtatgcttcaggggtaaatttaaaatagtctcttgaagccctagtcatggaagtaacttttattttaattgacattctcttattaaatgccctatccatcattaaaaggtttattatcagtgggcaaaacatgaaataatatgatcgaatggcaatcttgctagttgcgctacctaacagtaccatcttggatccttcaaaaccaaagacttgccccagcactgctgtggaaccacctggcttatgacccctatggatgatctttaggaaaagcagccctttacttttaatacaggctttaatgaactatacctgttaagttccaaaggtcaaaatggaggcatttgctgtctaatattcaaacatagaaagggagctgcttttaaagaattccctgcaaatactgaaagcagtcatgcgaatggagggtgctcttgtgtagctggtcagggacttttttttcttttctcctgaactacatgattctaattggaatgttcatttgcctctttttactcttttaaatgcttgtaggtggcttggggtgtgctatcgtgctgttcctactcagtaaacaggtgtgatgagttaacaagaaataacactgtttgagaactagctttgaataataatttttccctttgtacatgacctgctgaatttcggtacagtgtttttgtagctaacttattttgtcatgcacataatgtatatttgttatgcactacttttgtatatcttgtttttccaacagtgaacatttttaggcacacttttcactgacgggatatctctttatgcaatacctcaatttttcatattgcaaagagtagctttttgtacttttattactgagagatcttcatatacttcattttttaatataaataattttaataaattttattttcttatattctgctttttatacatttcagtgctctgcatacattttaaattatgaatgtcgtgcactggcaatgctattttagagtctgcagagaagagaaagcatgttgcttaaacatccttccccagcaccagctattggtgtacctataatttaagaaatagtctatgtaaagtcacaaattaatgaaaaaaattcgcatgaaaatgacagataacactgtagttcctaaaaaaaaaattaaatgcataagcataaggtagaaattaaaataacaaaattgtccacagcttcttactaagtttttaaaattattcataaaatgcagacatttttggtgaatgtttagccatttttaatattaataaattgatgttaagtgtttgattcagagatgtctgctcttttaaattatatataaggaaaaaaaatagcctgccttgggacaggtgtgtaatgttagtgtgcatgactaatgtaagaaattgttattctactaatatttacttgtgattgtgtgacaagtgtgtttacagattattggttacacttcaatttacagggcataaacaatgattatctattactctgaactttatgattacatgttcttcagattacatgggattgtagttgggagttaccatgtaactcaaacataattaacatgtaattagtttacagattgtagggcatcacttcaattcaccaagcatgtagttctagcgcactagcatggcgccagccatgtacttacaatgtagttacagagtaattacatggtgatttttgcaatgtaaaataaagtgtttctgattattttctatgtaaaggaaccctctcctttccccttctggtccctgcgctttggtataatatatatacttctccatacacagacctctgcagaatgcaaaataaaacttgcagtgaatgaatttagcattttatgagagtgctgttggaaagacttgataattcaccccttttgttttgaagagttgaatcttctgttaaaaggtgatttaaaacttgaatgtgatgaattgtggcaagttaacttcaagttatgtgcaatacttatttcaaacttttgaaagatctttgcagtgtaattctttgtttttaattgcagacatttaaaaatgtcattttctactgttaagagtaatcctctttcttgctggtgtttctaaagaaaagaatcagaaatcaatctttctactaatgtaaatttgagattatttttaaaaatggaataaaagaggttttggtcatttgctttattttattattttaaagctactgtgattgatagcattgtaagaatcgggacaatattgtattcaactgttttattttttatatttttaaaatttaaagtataattagtttttataattttcatcagatttttgttatattttttggaagtgaaacttttagcaagtgggtgtctagtttttactaatccctaattttttttccagtgtattgctcatattatcagaaggaaaagttatttaagtatgtcagttaattgtactacttggctgaatttccatatagtttttactgtgtatggggaggttgtagtatttattatagcattttaaataagggtaattcattttttattaaagtcattttcacgttaagttcctatttttgtatgttctactcttaagttatataacacagttccttttttaaaagagttcatttgttgaagtgctagtgaaaaattaatgttattaaatagtttgcaaatgactatttataccagtatgcatataatttttaaatatttgtaatgtgagatgttgaatgaataaaacttttaactcaaaaaaaaaaaaaaaaaaaaa

SEQ ID NO: 91 - DNA, 6339 bp, Homo sapiens; identical to SEQ ID NO: 53

SEQ ID NO: 92 - DNA, 1627 bp, Homo sapiens
attcctagtgactccaagcgcttaaaaggggcccgggaggatgaaccccacagatctgaacctgatttgtgtgtgcaccgcgtctccagcgatcccggatccactgcgctgccaggggcctgggggtgggtctcttgctgtctctgcgacgacatccttacgtttcggcactctaatgctgggtttgtgcgtgtgtgtctgcttagcggtctagcgggctgttaggctccctcgcccccagctccttggctcgctcagctcctccaccgcagcccagcagtgagacgcgcgcgcagccagctccccacgagatggaacagaccgaagtgctgaagccacggaccctggctgatctgatccgcatcctgcaccagctctttgccggcgatgaggtcaatgtagaggaggtgcaggccatcatggaagcctacgagagcgaccccaccgagtgggcaatgtacgccaagttcgaccagtacaggtatacccgaaatcttgtggatcaaggaaatggaaaatttaatctgatgattctctgttggggtgaaggacatggcagcagtattcatgatcataccaactcccactgctttctgaagatgctacagggaaatctaaaggagacattatttgcctggcctgacaaaaaatccaatgagatggtcaagaagtctgaaagagtcttgagggaaaaccagtgtgcctacatcaatgattccattggcttacatcgagtagagaacatcagccatacggaacctgctgtgagccttcacttgtacagtccaccttttgatacatgccatgcctttgatcaaagaacaggacataaaaacaaagtcacaatgacattccatagtaaatttggaatcagaactccaaatgcaacttcgggctcgctggagaacaactaaggggcaccaaaccctctgaggttttactttaaggttcgctgtatgtttgccttggacaaaaaggctacctaccacgtgctatccagtaatatacttaaataagccaatacttagatctactgtaaggcagatgctaattataaggcattaagtaagcaaatagtgccctcagctactgcagaagaaaagtcccactgaggaaaagaaagtcttgtgatttttaaaggcaagttttcaagtgctctcatagttctatcctctaattccattaaatccatactaggagcgtcagtgagggttttcatagcttttggaaatactttggtctctgaactgtaattagcaagaagtaaaaacagaaacgtcaaacgtcaaatgtttgctttgttacctggaggactaaatgtagatgtctttagtatactttgtatgttcttaatattggaagataattttgtgaatctgtagattttattttttcagtcttaccttacaaatttcttttctatgaataatagaggaacttacggcactctgccatttgttaatgaaaggaagtgcagaggatttagaaaagtacatgatccccagaccacaacaaaccaaaacataaactcatgtctgtgtcccatggtcatagtcaaagattttgtactgctaaaattaccaaataatttaaataaagtggatttgaacacaaaaaaaaaaaaaaa

SEQ ID NO: 93 - DNA, 354 bp, Homo sapiens
  misc_feature (280)..(280): n is a, c, g, or t
ctggtaaaatggtggttattctgaattctggttaaactttaaattgataattgctattatcatttcaaaattatttaaaatatgaccagatggattcctgcttccatgaattcaatggaattcaaatcttcccatttaaaataattttgtcggttgacctagaccccggggatcgggggcacccgtgggagcacggagattcgcctgggggtgggagggggaagccgtcagagagggggctgagctggggaagcagagaggggctcggggacagccgggnagagagagggtcgtgtcggagacccagtggggagagtagatgggccgggaaaggaggaagggtgagagtgggca

SEQ ID NO: 94 - DNA, 3025 bp, Homo sapiens
gcacgagcaggcagttcagattaaagaagctaattgatcaagaaatcaagtctcaggaggagaaggagcaagaaaaggagaaaagggtcaccaccctgaaagaggagctgaccaagctgaagtcttttgctttgatggtggtggatgaacagcaaaggctgacggcacagctcacccttcaaagacagaaaatccaagagctgaccacaaatgcaaaggaaacacataccaaactagcccttgctgaagccagagttcaggaggaagagcagaaggcaaccagactagagaaggaactgcaaacgcagaccacaaagtttcaccaagaccaagacacaattatggcgaagctcaccaatgaggacagtcaaaatcgccagcttcaacaaaagctggcagcactcagccggcagattgatgagttagaagagacaaacaggtctttacgaaaagcagaagaggagctgcaagatataaaagaaaaaatcagtaagggagaatatggaaacgctggtatcatggctgaagtggaagagctcataaaaatggaggagcagtgcagagatctcaataagaggcttgaaagggagacgttacagagtaaagactttaaactagaggttgaaaaactcagtaaaagaattatggctctggaaaagttagaagacgctttcaacaaaagcaaacaagaatgctactctctgaaatgcaatttagaaaaagaaaggatgaccacaaagcagttgtctcaagaactggagagtttaaaagtaaggatcaaagagctagaagccattgaaagtcggctagaaaagacagaattcactctaaaagaggatttaactaaactgaaaacattaactgtgatgtttgtagatgaacggaaaacaatgagtgaaaaattaaagaaaactgaagataaattacaagctgcttcttctcagcttcaagtggagcaaaataaagtaacaacagttactgagaagttaattgaggaaactaaaagggcgctcaagtccaaaaccgatgtagaagaaaagatgtacagcgtaaccaaggagagagatgatttaaaaaacaaattgaaagcggaagaagagaaaggaaatgatctcctgtcaagagttaatatgttgaaaaataggcttcaatcattggaagcaattgagaaagatttcctaaaaaacaaattaaatcaagactctgggaaatccacaacagcattacaccaagaaaacaataagattaaggagctctctcaagaagtggaaagactgaaactgaagctaaaggacatgaaagccattgaggatgacctcatgaaaacagaagatgaatatgagactctagaacgaaggtatgctaatgaacgagacaaagctcaatttttatctaaagagctagaacatgttaaaatggaacttgctaagtacaagttagcagaaaagacagagaccagccatgaacaatggcttttcaaaaggcttcaagaagaagaagctaagtcagggcacctctcaagagaagtggatgcattaaaagagaaaattcatgaatacatggcaactgaagacctaatatgtcacctccagggagatcactcagtctgcaaaaaaaaactaaatcaacaagaaaacaggaacagagatttaggaagagagattgaaaacctcactaaggagttagagaggtaccggcatttcagtaagagcctcaggcctagtctcaatggaagaagaatttccgatcctcaagtattttctaaagaagttcagacagaagcagtagacaatgaaccacctgattacaagagcctcattcctctggaacgtgcagtcatcaatggtcagttatatgaggagagtgagaatcaagacgaggaccctaatgatgagggatctgtgctgtccttcaaatgcagccagtctactccatgtcctgttaacagaaagctatggattccctggatgaaatccaaggagggccatcttcagaatggaaaaatgcaaactaaacccaatgccaactttgtgcaacctggagatctagtcctaagccacacacctgggcagccacttcatataaaggttactccagaccatgtacaaaacacagccactcttgaaatcacaagtccaaccacagagagtcctcactcttacacgagtactgcagtgataccgaactgtggcacgccaaagcaaaggataaccatcctccaaaacgcctccataacaccagtaaagtccaaaacctctaccgaagacctcatgaatttagaacaaggcatgtccccaattaccatggcaacctttgccagagcacagaccccagagtcttgtggttctctaactccagaaaggacaatgtccctattcaggttttggctgtgactggttcagctagctctcctgagcagggacgctccccagaaccaacagaaatcagtgccaagcatgcgatattcagagtctccccagaccggcagtcatcatggcagtttcagcgttcaaacagcaatagctcaagtgtgataactactgaggataataaaatccacattcacttaggaagtccttacatgcaagctgtagccagcccttcagcaccactgcaggataaccgaactcaaggcttaattaacggggcactaaacaaaacaaccaataaagtcaccagcagtattactatcacaccaacagccacacctcttcctcgacaatcacaaattacagtaagtaatatatataactgaccacgctcaccctcatccagtccatactgatatttttgcaaggaactcaatccttttttaatcatccctccatatcccccaagactgactgaactcgtactttgggaaggtttgtgcatgaactatacaagagtatctgaaactaactgttgcctgcatagtcatatcgagtgtgcacttactgtatatcttttcatttacatacttgtatggaaaatatttagtctgcacttgtataaatacatctttatgtatttgaaaaaaaaaaaa

SEQ ID NO: 95 - DNA, 3541 bp, Homo sapiens
gacagagtctggctctgtcacccaggctggatttcggtggcacgatctcggctcacygcaagctccgcctcccgggttcacgccattctcctgcctcagcctctacgagtggctgggactacaggcgcccgccactacgccccgctaattttttgtatttttggtaaagaggggtttcatcgtggtctaaatcgcctgacctcgtgatccacccacctcggcctcccaaagtgctgggattacaagcgttagccaccgcacctggcctctggacagtgtttttcacaggtcagattaatttttatataaatcatttattttatttttattatgtaaaattttataatttttaattttatttttaatttcctttttaaaagttaaataaaattttaagtgtaatgatgcaaaattttgtttaaaagtaaatgtatataaaaatgttgatatagactaaaaaattgaataagtaagaaggtagttagttgtcacagtaggagtgaagtgaaaagcttcccctttcaccctctgaagattaccggaaatgaactgaccatacacagattaataaaagaaagggtatacaaacttacataacctgcaaaaacatgagagctatacacaaagtataagacttgaagatggctcagatcttaaacgctctcctcataggcaatagatatatagacccaggatgcagacattattttgtaaataatttcctttggaagctggatgggacagacaaattacaggaaggtgagagatggaactgcacaggaaaaaagtttgtctttgtcactttaatcttatcattactagagaatatttatgaatattttagaataatatatttttaagcccaaatctcaccaaatgttttttctaaaacaaatacttttggttgttgtttgttttggttactgtgtctcactctgtcacccaggtatggagtgcagtggtgcaaccatggctcactgcagccttcacttcgtgggctcaagtgattctcctacctcagccttccaagtagctgggctacaggcatgcaccctcatgccctggtaattaaagaaaaaaatttcgttagagaccaagtctcattatgtcaccctggctagtcttgaactcctggaatcaactgatcctcatgccttggcttcccaaattattgggattataggtgtgagccacagtgactgaccacatatttctatacttcactgaggaaaggaaggtgctaggaaaattggttaagaactattttttaaaaagctattagtagtgttttattttattttttaatgattgattgatttttgagattgggatctcactacgttgcccaggctggtttcacattcccaagtttaagcaatacccctgcctcagtctcccaagtagctgggatgacaggtgtgtgtcaccatacccagctccattagtagcgtttttaacaattgtgggccactgagtaagaataattttttttaaattaaaggttattttttaaaaagcacatttgtagaaaattactagcataatctgcctaaaataaatatacatattgaaaaaatctttgctctgaacaaaaagaagtatattcaccacacatacatacatacacacacacacacgcacacacgcacacacgcacacacacacacacattatggaagatttcaagaccaggcaataatttccactcaatccaaaaacaatgcaatcccagagctgaatatttaggtgaaaaatatatcaggaatgggaggcattcaggtttaattttcatgttttggtagagttaggatgtgagttttcatttaaaaatattctttattttttttttactattgtggtttctgtattgttactatacaatctgtaaactaaatagtaaaggagagaaaagtgattttcaaagaagctggcttgggaacaggcactattctgggaagatgaaaggtttcacttaatgactggtacctgtgccactctggttattttaactgttaaccttttagcaagaggtttttcttttaaaagacatcctttaatatttgggaagctagtgcaatagtacacattgaggcccacataccacatgccaaatatttaaaaggcatatttctagctaaccactgtacatacatatattttttctcttattttcttattttagtttttttccttgacaacaatttatgtccacacatatcttctatcatcccactttgacaagtaatattataccttcaaaatgatgtggaagactagattggaatttagaaccgtagaaccttgtaattgtacaggcaagtttcttcctgggaaaaaataaaacaggaagaaaaggctgggcagcctctggttcaggaaggaaattcaggagtcccttatagcagcatctctagtacttgggaaccgaacagacttctcggcctgtgaggctggaatgggcccttctggagaacacgacagagaagttatctactgyctttgcccccagggcccaggcracacttttaccctccattgtttctgaagttaaggggaggagacaatgttttgtttagtgacctcgacagaaaaagtgtcctcctgcaaccactcatttgttactttccttcttcctgaattgcctggacccactcctcctccatttgactggctctgtgcactgatgttatagtcaggagatttttgggaattgtggcttctaaaaatgtacacccgactctacccatagctggccctgtgaacctacacacctgctccactgtgtctccttctcaaagagacactcttcctgctgaggctctgccctctgctcctagatccaaatggcatctcctaccctatccctgtatggcttaacctagggaaactctttcccagaggagtcaggtaaggagacggtggctgagcttcttacagacttaaaggagacatcctggaatttaggagtccgtccttcctttctgtaatccctggcagctcctgctgctgctcaaagtttagctttgtctctcatccagctcagactgttgctggtcctgatggcctctgcttagctgtattagtacgttcttgcattgctataaagaaatacatgagaaatacctttagttggctcatggttccataggctatacaggaagcatggtggtttctgcttgctggggagkcctcaggaaacttttactcaaggtgcagggcaaaaaaaaacaaaaaacaacaaaaaaaaaaagctaccagcactgcactgtgaggccctgatacctgagctaacttcatattattacctctacagcaagtgtccgtgagaacatagatatatttcttatgtgagtacacaatttacagaagaggaactacccttccaaaccaaaacaaaawgtcaaaaattagcttggtgtagtggtgtgcacctgcggtcctagctactcgggaggctgagggaggaggatcgattaagcccaggaacttgaggttgaagtgagctctgattgtgccactgcactcagccaaggtgacaaaa

SEQ ID NO: 96 - DNA, 2007 bp, Homo sapiens
ggcgcccacagagccgcggcaccatggcacctgctggacgcccgggggccaagaaggggattttggagcgcctggagagtggggaggttgtgattggagatggcagctttctcattactctggagaagagaggctatgtgaaggctgggctctggactccagaggcagtgatagaacacccagacgcagttcgtcaacttcacatggaattcttgagagcaggatcaaatgtcatgcagacttttaccttttctgccagtgaggacaatatggaaagcaagtgggaagatgtaaatgctgctgcctgtgacctcgccagggaagtggctggcaaaggtgatgctttggtagcaggggggatctgccagacatcaatatacaaataccagaaggatgaagctagaattaaaaaactttttcgacaacagctagaagtttttgcctggaaaaatgtggacttcttgattgcagagtattttgagcacgttgaagaagctgtgtgggctgtggaagtcttaaaagaatcagatagacccgtggcagttaccatgtgcataggcccagagggagacatgcatgatataacccccggagaatgtgctgtgaggctggtgaaggcaggggcttccatcgttggcgtgaactgccgctttgggcccgacaccagcttgaagacgatggagctcatgaaggagggtcttgagtgggcagggctgaaagcgcacctcatggtgcagcctctggggttccacgcgcctgactgtggcaaagaggggtttgtggatctcccagaatatccctttggactggagtccagagttgccaccagatgggatattcaaaaatacgccagagaggcctacaacctgggggtcaggtacattggcgggtgctgtggatttgagccctaccacatcagggcaattgcagaggagctggccccagaaaggggctttttgccaccagcttcagaaaaacacggcagctggggaagtggtttggacatgcacaccaaaccctggattagagcaagggctcgaagggagtattgggagaatctgctgccagcttcaggcagacctttctgtccttcgctgtcaaagccagacttctaaggagtagtgaaagaaaaccctgaaataatcgaacaggaaaaagttgccctcaagcctgacctggaaccgttcctcaccttcatcctcaccatgccctgctatctccagctgctgagcagctgaggtgctgcagccccttcccttccagcccacaagtgtgtgcatattgagctcctgctgtggttaagcactgcaacagactctaccagagatgcaaagagaagcgagagaggcaccttgttctccaagaacttactgtccaatcatgctgtggtgcattcctttgaagatcatgaagaatagccaaacttgtctttgagggtgaatttgacactttaaaataatcagaagtcactgagacccaaagctagtgaataattcaagtgactaagctagatacttgaggatgatagagcaacactaaactaaagcaatgagtctgctttttttaatgatttatacaatgactccaaaggcaatcccaaagaaaagatgtaaagaatgttttgagcaatggtagcattattgaaataaatgtttaactatccaaagtgattactttcaaagatgatttttacttaaagatattaggtctggccaggcgaagtgactcacacctgcaatcccagcactttgggaggccgaggcgggcggatcacctgaggtcagcagttcaagaccagcctgaccaacatggtgaaaccctgtctctaccaaaatacaaaaattagccgggcatgatggcgggtgcctgtaatcccagctactcgggaggctgaggcaggagaatcgcttgaacccaggaggcggagcttgcagtgagccgagatcaggccattgcacttcagcctgggtgacagagtgagactccatctcaaaaaaaaaaaaaaaa

SEQ ID NO: 97 - DNA, 1789 bp, Homo sapiens
gggggagcagaggggtcggaaagggaaaacaactacggctgcggtgtggttggtggtgagatgacgaccttagtgctggataatggagcttacaacgccaaaatcggttacagccatgaaaatgtgtcggttattcctaattgtcagttccggtcaaaaacagcacgtcttaaaacttttactgccaaccagatagatgaaataaaagacccttctggactcttttacatcctcccttttcaaaagggctacttggtgaattgggatgttcagagacaagtttgggattacctttttggaaaagaaatgtatcaggttgattttttagatactaatattattatcactgaaccatactttaacttcacttcaattcaagaatcaatgaatgaaattctatttgaagaataccagtttcaagcagtattaagagtaaatgctggggctctcagtgcacataggtatttccgagataatccttccgaattatgctgtatcattgttgatagtggatattcctttacacatatagttccttattgtagaagtaaaaagaaaaaagaagcaattattcggataaatgtgggaggaaaactcttaaccaatcatctaaaggagatcatatcttacaggcagctacatgttatggatgaaacacatgtgattaatcaagtgaaagaagatgtatgctatgtgtctcaggatttttatagagacatggatattgcaaagttgaaaggagaagaaaatacagtaatgatagactatgtcttgcctgacttcagtacaattaaaaagggcttttgtaagccaagggaagagatggtgttgagtggaaaatacaaatctggggaacaaattcttcgtttggccaatgagagatttgctgttccggaaatactctttaatccttctgatataggcattcaagaaatgggaattccagaagctattgtctattcaattcaaaatctacctgaagaaatgcagccgcatttttttaagaacattgtcttgacaggaggaaattcccttttcccaggatttagggatcgggtttactcagaagttcgatgtcttactccaacagattatgatgtttctgttgtgctgcctgaaaaccctattacttatgcctgggaaggtggaaaattgatatcagagaatgatgattttgaagatatggtggtaacaagagaagattacgaagaaaatggacatagcgtctgtgaagagaaatttgatatttaagcaacatttttgaatgaaagttgtgaccataaggtttaatttcaaagttccttttaaaagaggttaaggaactgtgttaccttttgtcctaagaaaaaggcttgaatttatgtaaatactttgatcgattgctaattttcaaaggcttcttaggtaggttactacagtaaactgtaactcagtccacattttcatttaggagctagactaccataacaatgcttatgctgtttccaagggtaggttatttttcattaaaagaagaatgaatgcattttaagtttaattcttcatagctgaaagcacaaatttaacggcttcactggacagttttccttagaaggtagttttgtgtgactgtgactaaactattttattttaaaatgtcattcttatttatacattctaaagttggaaagactgatcttatatgtgtataatgtttattttgtacctagagtacatttaaaagggtggagactaagctaataaagtttttttggccactgaaaaaaaaaaaaaaaaaaaaaaaaaaaaa

SEQ ID NO: 98 - DNA, 1908 bp, Homo sapiens
ctctgtctcattccctcgcgctctctcgggcaacatggcgggtgtggaggaggtagcggcctccgggagccacctgaatggcgacctggatccagacgacagggaagaaggagctgcctctacggctgaggaagcagccaagaaaaaaagacgaaagaagaagaagagcaaagggccttctgcagcaggggaacaggaacctgataaagaatcaggagcctcagtggatgaagtagcaagacagttggaaagatcagcattggaagataaagaaagagatgaagatgatgaagatggagatggcgatggagatggagcaactggaaagaagaagaaaaagaagaagaagaagagaggaccaaaagttcaaacagaccctccctcagttccaatatgtgacctgtatcctaatggtgtatttcccaaaggacaagaatgcgaatacccacccacacaagatgggcgaacagctgcttggagaactacaagtgaagaaaagaaagcattagatcaggcaagtgaagagatttggaatgattttcgagaagctgcagaagcacatcgacaagttagaaaatacgtaatgagctggatcaagcctgggatgacaatgatagaaatctgtgaaaagttggaagactgttcacgcaagttaataaaagagaatggattaaatgcaggcctggcatttcctactggatgttctctcaataattgtgctgcccattatactcccaatgccggtgacacaacagtattacagtatgatgacatctgtaaaatagactttggaacacatataagtggtaggattattgactgtgcttttactgtcacttttaatcccaaatatgatacgttattaaaagctgtaaaagatgctactaacactggaataaagtgtgctggaattgatgttcgtctgtgtgatgttggtgaggccatccaagaagttatggagtcctatgaagttgaaatagatgggaagacatatcaagtgaaaccaatccgtaatctaaatggacattcaattgggcaatatagaatacatgctggaaaaacagtgccgattgtgaaaggaggggaggcaacaagaatggaggaaggagaagtatatgcaattgaaacctttggtagtacaggaaaaggtgttgttcatgatgatatggaatgttcacattacatgaaaaattttgatgttggacatgtgccaataaggcttccaagaacaaaacacttgttaaatgtcatcaatgaaaactttggaacccttgccttctgccgcagatggctggatcgcttgggagaaagtaaatacttgatggctctgaagaatctgtgtgacttgggcattgtagatccatatccaccattatgtgacattaaaggatcatatacagcgcaatttgaacataccatcctgttgcgtccaacatgtaaagaagttgtcagcagaggagatgactattaaacttagtccaaagccacctcaacacctttattttctgagctttgttggaaaacatgataccagaattaatttgccacatgttgtctgttttaacagtggacccatgtaatacttttatccatgtttaaaaagaaggaatttggacaaaggcaaaccgtctaatgtaattaaccaacgaaaaagctttccggacttttaaatgctaactgtttttccccttcctgtctaggaaaatgctataaagctcaaattagttaggaatgacttatacgttttgttttgaatacctaagagatactttttggatatttatattgccatattcttacttgaatgctttgaatgactacatccagttctgcacctataccctctggtgttgctttttaaccttcctggaatccatttctaaaaaataaagacattttcagatctga

SEQ ID NO: 99 - DNA, 3878 bp, Homo sapiens
ggctccccactctgccagagcgaggcggggcagtgaggactccgcgacgcgtccgcaccctgcggccagagcggctttgagctcggctgcgtccgcgctaggcgctttttcccagaagcaatccaggcgcgcccgctggttcttgagcgccaggaaaagcccggagctaacgaccggccgctcggccactgcacggggccccaagccgcagaaggacgacgggagggtaatgaagctgagcccaggtctcctaggaaggagagagtgcgccggagcagcgtgggaaagaagggaagagtgtcgttaagtttacggccaacggtggattatccgggccgctgcgcgtctgggggctgcggaatgcgcgaggagaacaagggcatgcccagtgggggcggcagcgatgagggtctggccagcgccgcggcgcggggactagtggagaaggtgcgacagctcctggaagccggcgcggatcccaacggagtcaaccgtttcgggaggcgcgcgatccaggtcatgatgatgggcagcgcccgcgtggcggagctgctgctgctccacggcgcggagcccaactgcgcagaccctgccactctcacccgaccggtgcatgatgctgcccgggagggcttcctggacacgctggtggtgctgcaccgggccggggcgcggctggacgtgcgcgatgcctggggtcgtctgcccgtggacttggccgaggagcggggccaccgcgacgttgcagggtacctgcgcacagccacgggggactgacgccaggttccccagccgcccacaacgactttattttcttacccaatttcccacccccacccacctaattcgatgaaggctgccaacggggagcggcggaaagcctgtaagcctgcaagcctgtctgagactcacaggaaggaggagccgaccgggaataaccttccatacatttttttctttgtcttatctggccctcgacactcaccatgaagcgaaacacagagaagcggatttccagggatatttaggagtgtgtgacattccaggggtcgtttgcttttcagggttttctgagggaaagtgcatatgaaatccttgactggacctggtggctacgaatcttccgatggatgaatctcccactccagcgctgagtgggagaaggcagtgattagcacttgggtgacggcagtcgatgcgttcactccaatgtctgctgaggagttatggtgaacccacaacttaggccctagcggcagaaaggaaaacctgaagactgaggacaaagtggaggagggccgaggtgggcttcagtaagtccccggcggcgctttagtttgagcgcatggcaagtcacatgcgtaaacgacactctctggaagccctggagaccctcgcccaactccaccagatagcagaggggtaagagaggatgtgcaagcgacgacagatgctaaaatccctggatcacgacgctgcagagcacctttgcacaggatgctggcctttgctcttactacactgaggagagattcccgcgggttccgcaggcagactacacaggatgaggtggtggagtggagtgagagcaattgtaacggttaactgtaacgttttctttcacacacacacacacacacacacacacacatgctaggatgcggaaatccccttatgacttgctactttttgattttgtgatattttgtactttttagttgttcagcaactgtcttatttaatggggagattttaagtaacataactagtggctctcagttaaaatgtgaggaagaactacagctcttaaatgtagcaatggcactgttgcaaactcagtgcaaacgcctagattgctttcttcttaacctatttatttctttgttaaatttttctgattgtttcctttatagagtgtctcagggtgcagaggtcagactaagaaatattccaaatgtcttttagaagatagatgcacttatgcagtaaattatcttgggatagttcccaaaagattgctgaaaaagtagattgagtataaaaacttgaaaatatatgatggctcgtgggatgtcctactatcactgaacaaactaaaggtgcactgctttgggatttaatttccagggttgcttgatcattatatcattggaacaactgatacttcactactttaataaagaattaacagagattgaactccaagaggtgggtaatttggtttaaaaatacatgttcatgggtttaccactaactcctgagaaatgttaaaggttcacaggggttcccttctctcaatgtttgtaataattgctcataagcaataccagcaattcataaaaactgcttacttatgccatagaaaattaaacacaaagtgtatacatgtattatgcttctaaatgctcattctaccagatacacatttaaaagagaaaaaaggaacagaaacaagtcatttgagagtggagacttataagaaggagtacatttgagttgaatacacaaatctttacttctctaccaattcctattcccaaaatgaacatattactggggaaagttagttgagaatcagagcatatgttattggggaaaggatatgtttattgacacataatctgtaccaggtatgcattaaaatatatttgttaatttaatatttaaacctgagagataggtattgtttcccagatgaggacaatgaggcaaagaaatatcaagtaacttgccaaaggttacaagatattcattccatggatgcacaaagaagtgcatctagttccacagctgattatggttgtcttgcttttcttcccattgcaccagcttgtcctccaaaatcatgaatgatacacatgaagataactttttttaaaaaaaagcagaaatacacaatgatctcccttgtaagctcctaaggtggcttttctttctctaacttctagtaaatataaacggtttgtttgaaaactattttaaaatgtcaacaatatggagaataaccccccccaacacacctataaaaacccaaatttttggaacaaagataatggaacctccattttcaaactgaagcacagggacagaaaatatatttctagttatcacttaagcactcaatcattagaggctacaagaataatatttttaaagttacagtattttacaattattagaaaacattctatataaaagaagtcagttgatactttaaaatctcccatttggtttataaaatcccttaatttgacctctatatcttaaattccaagatgtttaaatttgctagttgcattatactgggtcatgaaaaattatcccttgaaatagatatgaaacatgttacttcatttctggtttaaataacttgtggaatctttcctaatgacaacctgatattaagggaaactaaagaaaatgttattgtggatcccacagtactatattacactgttttttttgtttgttttgttagttttttttatttaaagcaaacctcaaacattattgggtatcaattaccacctggttgtattgaaatagtaacttatcaatgccatgtaaaaattaattccattttcgaagccacctggcagacaggtttagctgtttcatcagcagcctaatatatactgttaaatttgttaaggatttcactttgaaggatacatgcaaaacatatagttactattttcatgagtcctgcttctagctccattgtggaatacagaaaattaaatatacctgttaagttcgtatctaaacctaagacattaccaaggtttgtacaaattctactacctgacatttattccaagaagatctggaaagttaaataaatttataaatttaataacaaaaaaaaaaaaaaaaaa

SEQ ID NO: 100 - DNA, 4001 bp, Homo sapiens
ggctccccactctgccagagcgaggcggggcagtgaggactccgcgacgcgtccgcaccctgcggccagagcggctttgagctcggctgcgtccgcgctaggcgctttttcccagaagcaatccaggcgcgcccgctggttcttgagcgccaggaaaagcccggagctaacgaccggccgctcggccactgcacggggccccaagccgcagaaggacgacgggagggtaatgaagctgagcccaggtctcctaggaaggagagagtgcgccggagcagcgtgggaaagaagggaagagtgtcgttaagtttacggccaacggtggattatccgggccgctgcgcgtctgggggctgcggaatgcgcgaggagaacaagggcatgcccagtgggggcggcagcgatgagggtctggccagcgccgcggcgcggggactagtggagaaggtgcgacagctcctggaagccggcgcggatcccaacggagtcaaccgtttcgggaggcgcgcgatccaggtagctggggccccagggcctcgccggcagggggcgcgcgaacgcggggcgcggcctcggcggatcggggctggaacctagatcgccgatgtagatttgtacaggagtctccgttggccggaggtcatgatgatgggcagcgcccgcgtggcggagctgctgctgctccacggcgcggagcccaactgcgcagaccctgccactctcacccgaccggtgcatgatgctgcccgggagggcttcctggacacgctggtggtgctgcaccgggccggggcgcggctggacgtgcgcgatgcctggggtcgtctgcccgtggacttggccgaggagcggggccaccgcgacgttgcagggtacctgcgcacagccacgggggactgacgccaggttccccagccgcccacaacgactttattttcttacccaatttcccacccccacccacctaattcgatgaaggctgccaacggggagcggcggaaagcctgtaagcctgcaagcctgtctgagactcacaggaaggaggagccgaccgggaataaccttccatacatttttttctttgtcttatctggccctcgacactcaccatgaagcgaaacacagagaagcggatttccagggatatttaggagtgtgtgacattccaggggtcgtttgcttttcagggttttctgagggaaagtgcatatgaaatccttgactggacctggtggctacgaatcttccgatggatgaatctcccactccagcgctgagtgggagaaggcagtgattagcacttgggtgacggcagtcgatgcgttcactccaatgtctgctgaggagttatggtgaacccacaacttaggccctagcggcagaaaggaaaacctgaagactgaggacaaagtggaggagggccgaggtgggcttcagtaagtccccggcggcgctttagtttgagcgcatggcaagtcacatgcgtaaacgacactctctggaagccctggagaccctcgcccaactccaccagatagcagaggggtaagagaggatgtgcaagcgacgacagatgctaaaatccctggatcacgacgctgcagagcacctttgcacaggatgctggcctttgctcttactacactgaggagagattcccgcgggttccgcaggcagactacacaggatgaggtggtggagtggagtgagagcaattgtaacggttaactgtaacgttttctttcacacacacacacacacacacacacacacatgctaggatgcggaaatccccttatgacttgctactttttgattttgtgatattttgtactttttagttgttcagcaactgtcttatttaatggggagattttaagtaacataactagtggctctcagttaaaatgtgaggaagaactacagctcttaaatgtagcaatggcactgttgcaaactcagtgcaaacgcctagattgctttcttcttaacctatttatttctttgttaaatttttctgattgtttcctttatagagtgtctcagggtgcagaggtcagactaagaaatattccaaatgtcttttagaagatagatgcacttatgcagtaaattatcttgggatagttcccaaaagattgctgaaaaagtagattgagtataaaaacttgaaaatatatgatggctcgtgggatgtcctactatcactgaacaaactaaaggtgcactgctttgggatttaatttccagggttgcttgatcattatatcattggaacaactgatacttcactactttaataaagaattaacagagattgaactccaagaggtgggtaatttggtttaaaaatacatgttcatgggtttaccactaactcctgagaaatgttaaaggttcacaggggttcccttctctcaatgtttgtaataattgctcataagcaataccagcaattcataaaaactgcttacttatgccatagaaaattaaacacaaagtgtatacatgtattatgcttctaaatgctcattctaccagatacacatttaaaagagaaaaaaggaacagaaacaagtcatttgagagtggagacttataagaaggagtacatttgagttgaatacacaaatctttacttctctaccaattcctattcccaaaatgaacatattactggggaaagttagttgagaatcagagcatatgttattggggaaaggatatgtttattgacacataatctgtaccaggtatgcattaaaatatatttgttaatttaatatttaaacctgagagataggtattgtttcccagatgaggacaatgaggcaaagaaatatcaagtaacttgccaaaggttacaagatattcattccatggatgcacaaagaagtgcatctagttccacagctgattatggttgtcttgcttttcttcccattgcaccagcttgtcctccaaaatcatgaatgatacacatgaagataactttttttaaaaaaaagcagaaatacacaatgatctcccttgtaagctcctaaggtggcttttctttctctaacttctagtaaatataaacggtttgtttgaaaactattttaaaatgtcaacaatatggagaataaccccccccaacacacctataaaaacccaaatttttggaacaaagataatggaacctccattttcaaactgaagcacagggacagaaaatatatttctagttatcacttaagcactcaatcattagaggctacaagaataatatttttaaagttacagtattttacaattattagaaaacattctatataaaagaagtcagttgatactttaaaatctcccatttggtttataaaatcccttaatttgacctctatatcttaaattccaagatgtttaaatttgctagttgcattatactgggtcatgaaaaattatcccttgaaatagatatgaaacatgttacttcatttctggtttaaataacttgtggaatctttcctaatgacaacctgatattaagggaaactaaagaaaatgttattgtggatcccacagtactatattacactgttttttttgtttgttttgttagttttttttatttaaagcaaacctcaaacattattgggtatcaattaccacctggttgtattgaaatagtaacttatcaatgccatgtaaaaattaattccattttcgaagccacctggcagacaggtttagctgtttcatcagcagcctaatatatactgttaaatttgttaaggatttcactttgaaggatacatgcaaaacatatagttactattttcatgagtcctgcttctagctccattgtggaatacagaaaattaaatatacctgttaagttcgtatctaaacctaagacattaccaaggtttgtacaaattctactacctgacatttattccaagaagatctggaaagttaaataaatttataaatttaataacaaaaaaaaaaaaaaaaaa

SEQ ID NO: 101 - DNA, 3673 bp, Homo sapiens
ctcctcctctcagcacctggcgcggcgctacgcggccctggccgccgaggactgcgccgctgctgcccgccgcttcctgctatcctcggccgccgccgccgccgccgctgccgcctcggcttcgtcgcccgcctcctgctgcaaagagttggggctggctgcggccgccgcctgggagcagcagggccgaagtctcttcctggccagcttggggccggtgcgcttcctggggccgcccgccgccgtgcagctcttccgggggccgacaccgtcaccggccgagctccctacgccccccgaaatggtgtgcaagcggaagggggccggggtccccgcctgcaccccctgcaagcagccccgcagccgctctgccctccgccctcttctcccacctccgaaggtgcccccaccgaagctggcggggacgctgtccgagccgggggcaccgcccccttgtccgcccagcagcagcatgaatgtggcgacgcggactgtcgggagtcccccgaaaacccctgcgactgtcacagggagccgccccccgaaaccccagacatcaaccagctgccgccgtccatcctgctcaagatattttccaatttgtcactggatgagcgttgcctttccgcatcattggtttgcaagtactggcgtgacctttgtttagacttccagttttggaagcagctggatcttagtagtcgtcagcaggtcactgatgaattgttggaaaaaattgcatcaagaagtcagaatataattgaaatcaacatttctgattgtcgcagtatgtctgataatggcgtatgtgttttagcatttaaatgtcctggacttcttaggtatacagcctacaggtgtaaacagctttctgacacctctattattgcggttgcctctcactgtcctttacttcagaaagtgcatgtaggcaaccaggacaaactcactgatgaaggactcaagcagctgggctcaaaatgcagagaactcaaagatattcatttcggccagtgttacaagatctcagatgaaggcatgatcgtcatagctaagggctgtctgaaattacaaaggatatacatgcaggaaaacaaattagtgacagatcagtcagtgaaagcatttgctgaacactgtcctgagcttcaatatgtaggcttcatgggttgttcagtcacttctaaaggagtcattcacctaaccaagctaagaaacctttccagcttggacctacgtcatatcactgaactggataatgaaaccgtgatggaaattgtcaagaggtgcaaaaatcttagctctctcaatctctgtctgaactggatcataaatgacaggtgtgtggaggtcattgcaaaggaaggacaaaacctgaaagagctatatttggtgtcctgtaaaatcacagattatgcactgatagccattgggcgatacagcatgacaatagagactgtggatgtcggatggtgtaaagaaatcacagaccaaggagccaccctgattgcacagagcagcaagtctctgagatatttggggctgatgagatgtgataaagtcaacgaagtgacggtggaacagctggtgcagcagtacccccacatcaccttcagcaccgtcctgcaggactgcaagaggaccttggagagagcctatcagatgggctggacccccaacatgtctgccgcctcctcctagcgctcctgcctcgcctagtccactgggatcattcagcagagcagaggagaattgtacatttggggagctgatctctcggaagggttttaactgtcacctgtctgtgtgtgttcaagtatgtgtatttgtgtcttgtttgcatactgcataccaaaagtgcagttgtcatttgttcccaagtgagctggctttttttcttagaaattaaagattatgaaagccacaaactttttagtttttaacttcaaaggcttctttctctttaaaaaaaaattatttttaatatagagtcaaaaaattggatgtattattttgagcttctaattgctgccacttggagatgtccaagtaagaaggccttctttttacatgggatgaattgtgcacttctactgatgatgactacagcagaagtgatgttatacgtacaggcacttacactctctcacatattcacacgtgtgcacatctacaccagggctctgatctactctagatcgtttcctgacagagaagccttcttccaggccactaaggtagcatgttatccactgtggcactgcctaactccgtgtatcctcgggtggccaacttgctatctggtgggtgacttggggactagaaagaataaagccttttctaaatttgttatatagaggcaacagtctgaactctcctggccagctcacgaaagttaattatacattattctacaaatgcattctgttgagcactaaatattttagttggttttatgttaacattgtgttagcttttatttcctggatagtaactggtcaggatatattttaatgatatttgaaactaatcttagcattgaagccaccaatgtaattaatggtgtgcagttattttaaaaactacagatcatttcattattttcttaattttggtaattattaaagtctatttctgagatacgagagggtagtcacattaatagaagattcatgagtgagatataagtagacaatctttctactgttgttgctctttttgctttgctttgggttcttgaacaggttttttggatatatgcatgttgtcattttggactagttctcatgctactgcaaagatctattgctagctaatatatgagttaagaaagaaaattagaaaatctgttcattgaaattctgtttacacttgtcagaaataagcatttctttgtttaattaaggattgccagcttcagttaagacaagacctatcagtaaatgaatatatgttttgatttaacacatctttacaattaattcataatagggactcaggctcaaataactgttcctgtgtctagatttataatgaggacatcagggagcctttttaagctaaagagtgattatctttcacagtagaactagaaacaaaaccctaacttgtgaagttgctatttatttttccctgagtgaatataactgttatttggtctttaacagatatactgaggtttgagtttcactttctttaagtctcacattgctaacatgacattagctgtaagaaacaagatagctttacatttgaatgccatttactgatttctaatgattctctttttttgtaaacaactgtttcctttgattatgtcaacatgtttctgatgtggcatttttgttttaatcccaatcggttaggaaaatctagtcagtaagcgccatgagtattcttcccataactaaatgggtttctaatttaatttgaagggaataaaatttgtgtaagaaaaaagctgtttaacattaataaactatatttcttcttacacattgaactgtatcattttcatatccacttccccaccactgaaatatcttatttcacaatattttaactgatttttaatccaaaactaatttataagacagtatgtatagtaatagtagcttgagtgaatatgcaaaagtttaatttttatatatgtcatactatattttaaatagtt

SEQ ID NO: 102 - DNA, 2574 bp, Homo sapiens
gcaaaaagcgtgggcagttggagaagaagcagccagagtgtgaagaagcccacggaaggaaagtccagggaggaggaaaagaagcagaagttttggcatctgttccctggctgtgccaagatgggcgattggagcttcctgggaaatttcctggaggaagtacacaagcactcgaccgtggtaggcaaggtctggctcactgtcctcttcatattccgtatgctcgtgctgggcacagctgctgagtcttcctggggggatgagcaggctgatttccggtgtgatacgattcagcctggctgccagaatgtctgctacgaccaggctttccccatctcccacattcgctactgggtgctgcagatcatcttcgtctccacgccctctctggtgtacatgggccacgccatgcacactgtgcgcatgcaggagaagcgcaagctacgggaggccgagagggccaaagaggtccggggctctggctcttacgagtacccggtggcagagaaggcagaactgtcctgctgggaggaagggaatggaaggattgccctccagggcactctgctcaacacctatgtgtgcagcatcctgatccgcaccaccatggaggtgggcttcattgtgggccagtacttcatctacggaatcttcctgaccaccctgcatgtctgccgcaggagtccctgtccccacccggtcaactgttacgtatcccggcccacagagaagaatgtcttcattgtctttatgctggctgtggctgcactgtccctcctccttagcctggctgaactctaccacctgggctggaagaagatcagacagcgatttgtcaaaccgcggcagcacatggctaagtgccagctttctggcccctctgtgggcatagtccagagctgcacaccaccccccgactttaatcagtgcctggagaatggccctgggggaaaattcttcaatcccttcagcaataatatggcctcccaacaaaacacagacaacctggtcaccgagcaagtacgaggtcaggagcagactcctggggaaggtttcatccaggttcgttatggccagaagcctgaggtgcccaatggagtctcaccaggtcaccgccttccccatggctatcatagtgacaagcgacgtcttagtaaggccagcagcaaggcaaggtcagatgacctatcagtgtgaccctcctttatgggaggatcaggaccaggtgggaacaaaggaggctcagagaagaaagacgtgtcccttctgaactgatgctttctcactgtcatcactgcttggctcctttgagccccgggtctcaatgacgttgctcattaattctagaaactataaccagggctctgggatagtaagagaggtgacaacccacccagactgcagttccctccccaccctctacccagtatacgaagcctttcagattactcatgaaacagggtagagggaaagaagggaagcatggcaaaagctggcctggaagggatagccagagggatagaatgactctctctctacataccagcagcataccaaatgcgttctctaagttcctacctccttgacctgatcaccctccctcctccaaggaagagctcaaagttcccagccaatagacagcatgaatcaaggaacttgcattatatgtgctcttgaatctgttgtctccatggaccattcctcggagtagtggtgagatggccttgggttgcccttggcttctcctccctctactcagccttaaaaagggcttcttggaactttaccagcagcctcagctttacaaatgccttggtatgtacctctggcaaatgccccaccttggtgatgttgcaacctttccttctgctagggtgtacacctagcctgtgcaggtgtcagccctgctagggagtcactgtacacacaaactctactggaattcctgccaacatctgtcaccctgcagctcctttacagttcaatccaatgatagaaaccatcccttccctttctcccttggctgttcacccagccattccctgaaggccttaccaacaggaatatccaagaagctgttgtcccctctcgaaccctgaccagatcatcagccactgaggccagtggaatttccccaggccttgttaaaacaaagaaagcattgtacctctcagattccccttgtggaaaaaaaaattctgctgtgaagatgaaaataaaaatggagagaaaacactggaaaactattttcccctcctatttacttcctttgctgactgccaacttagtgccaagaggaggtgtgatgacagctatggaggcccccagatctctctctcctggaggctttagcaggggcaaggaaatagtaggggaatctccagctctcttggcagggcctttatttaaagagcgcagagattcctatgtctccctagtgcccctaatgagactgccaagtgggggctgtagaaaagccttgccttccccagggattggcctggtctctgtattcactggatccataatgggttgctgttgttttggatgaaggtaaacgatgcttggaattgg

SEQ ID NO: 103 - DNA, 1616 bp, Homo sapiens
ctccctgtgttggtggaggatgtctgcagcagcatttaaattctgggagggcttggttgtcagcagcagcaggaggaggcagagcacagcatcgtcgggaccagactcgtctcaggccagttgcagccttctcagccaaacgccgaccaaggaaaactcactaccatgagaattgcagtgatttgcttttgcctcctaggcatcacctgtgccataccagttaaacaggctgattctggaagttctgaggaaaagcagctttacaacaaatacccagatgctgtggccacatggctaaaccctgacccatctcagaagcagaatctcctagccccacagacccttccaagtaagtccaacgaaagccatgaccacatggatgatatggatgatgaagatgatgatgaccatgtggacagccaggactccattgactcgaacgactctgatgatgtagatgacactgatgattctcaccagtctgatgagtctcaccattctgatgaatctgatgaactggtcactgattttcccacggacctgccagcaaccgaagttttcactccagttgtccccacagtagacacatatgatggccgaggtgatagtgtggtttatggactgaggtcaaaatctaagaagtttcgcagacctgacatccagtaccctgatgctacagacgaggacatcacctcacacatggaaagcgaggagttgaatggtgcatacaaggccatccccgttgcccaggacctgaacgcgccttctgattgggacagccgtgggaaggacagttatgaaacgagtcagctggatgaccagagtgctgaaacccacagccacaagcagtccagattatataagcggaaagccaatgatgagagcaatgagcattccgatgtgattgatagtcaggaactttccaaagtcagccgtgaattccacagccatgaatttcacagccatgaagatatgctggttgtagaccccaaaagtaaggaagaagataaacacctgaaatttcgtatttctcatgaattagatagtgcatcttctgaggtcaattaaaaggagaaaaaatacaatttctcactttgcatttagtcaaaagaaaaaatgctttatagcaaaatgaaagagaacatgaaatgcttctttctcagtttattggttgaatgtgtatctatttgagtctggaaataactaatgtgtttgataattagtttagtttgtggcttcatggaaactccctgtaaactaaaagcttcagggttatgtctatgttcattctatagaagaaatgcaaactatcactgtattttaatatttgttattctctcatgaatagaaatttatgtagaagcaaacaaaatacttttacccacttaaaaagagaatataacattttatgtcactataatcttttgttttttaagttagtgtatattttgttgtgattatctttttgtggtgtgaataaatcttttatcttgaatgtaataagaatttggtggtgtcaattgcttatttgttttcccacggttgtccagcaattaataaaacataaccttttttactgcctaaaaaaaaaaaaaaaaaaaaaaaaaaaaaaaaaa

SEQ ID NO: 104 - DNA, 1671 bp, Homo sapiens
cgggggtcgctatggaggagccggagatgcagctcaaggggaagaaagtcacggacaagttcactgagagcgtctacgtcctggccaacgagccatccgtggccctgtaccggctgcaggagcatgtgcgtcgctccctccccgagctggcccagcacaaggcagacatgcagcgttgggaggagcagagccagggagccatctacactgtggagtacgcctgcagcgccgtgaagaacctggtggacagcagcgtctacttccgcagcgtggagggtctgctcaaacaggccatcagcatccgggaccatatgaatgccagtgcccagggccacagcccggaggaaccacccccgccctcctcagcctgatcctggaagagactcggggccccccagcctccgccaacccagacaaagatcattccactcagcctgggacgatggggaggaaaaaaatccagatctcccgcatcctggaccaaaggaatcggcaggtgacgttcaccaagcggaagttcgggctgatgaagaaggcctatgagctgagcgtgctctgtgactgtgagatagccctcatcatcttcaacagcgccaaccgcctcttccagtatgccagcacggacatggaccgtgtgctgctgaagtacacagagtacagcgagccccacgagagccgcaccaacactgacatcctcgagacgctgaagcggaggggcattggcctcgatgggccagagctggagccggatgaagggcctgaggagccaggagagaagtttcggaggctggcaggcgaagggggtgatccggccttgccccgaccccggctgtatcctgcagctcctgctatgcccagcccagatgtggtatacggggccttaccgccaccaggctgtgaccccagtgggcttggggaagcactgcccgcccagagccgcccatctcccttccgaccagcagcccccaaagccgggcccccaggcctggtgcaccctctcttctcaccaagccacctcaccagcaagacaccacccccactgtacctgccgacggaagggcggaggtcagacctgcctggtggcctggctgggccccgagggggactaaacacctccagaagcctctacagtggcctgcagaacccctgctccactgcaactcccggacccccactggggagcttccccttcctccccggaggccccccagtgggggccgaagcctgggcgaggagggtcccccaacccgcggcgcctccccgccgacccccccagtcagcatcaagtctgagcgcctctctccggcccccgggggccccggcgactttcctaagaccttcccctatcccttgctcctcgcccggtccctggcagagcctctgcggcctgggcccgccctgcgccggctgcccttggccgacggctggccccggtaggagatcacccggtggcaccagcccagagcgctcgccaggtacggcgagggcacgtggggaccccacctccctccaggcctcttcagagaagacccaacagtgacgcccccctccgcggtgggggcttggaggtgggcggctggactcaatccaccctggggggctcctttccttcttcctatttgtgtgtatatccacaaataaaacgcgcgtggcgtccgtggaccaaaaaaa

SEQ ID NO: 105 - DNA, 6475 bp, Homo sapiens
ggcgaggcgaggtttgctggggtgaggcagcggcgcggccgggccgggccgggccacaggcggtggcggcgggaccatggaggcggcggtcgctgctccgcgtccccggctgctcctcctcgtgctggcggcggcggcggcggcggcggcggcgctgctcccgggggcgacggcgttacagtgtttctgccacctctgtacaaaagacaattttacttgtgtgacagatgggctctgctttgtctctgtcacagagaccacagacaaagttatacacaacagcatgtgtatagctgaaattgacttaattcctcgagataggccgtttgtatgtgcaccctcttcaaaaactgggtctgtgactacaacatattgctgcaatcaggaccattgcaataaaatagaacttccaactactgtaaagtcatcacctggccttggtcctgtggaactggcagctgtcattgctggaccagtgtgcttcgtctgcatctcactcatgttgatggtctatatctgccacaaccgcactgtcattcaccatcgagtgccaaatgaagaggacccttcattagatcgcccttttatttcagagggtactacgttgaaagacttaatttatgatatgacaacgtcaggttctggctcaggtttaccattgcttgttcagagaacaattgcgagaactattgtgttacaagaaagcattggcaaaggtcgatttggagaagtttggagaggaaagtggcggggagaagaagttgctgttaagatattctcctctagagaagaacgttcgtggttccgtgaggcagagatttatcaaactgtaatgttacgtcatgaaaacatcctgggatttatagcagcagacaataaagacaatggtacttggactcagctctggttggtgtcagattatcatgagcatggatccctttttgattacttaaacagatacacagttactgtggaaggaatgataaaacttgctctgtccacggcgagcggtcttgcccatcttcacatggagattgttggtacccaaggaaagccagccattgctcatagagatttgaaatcaaagaatatcttggtaaagaagaatggaacttgctgtattgcagacttaggactggcagtaagacatgattcagccacagataccattgatattgctccaaaccacagagtgggaacaaaaaggtacatggcccctgaagttctcgatgattccataaatatgaaacattttgaatccttcaaacgtgctgacatctatgcaatgggcttagtattctgggaaattgctcgacgatgttccattggtggaattcatgaagattaccaactgccttattatgatcttgtaccttctgacccatcagttgaagaaatgagaaaagttgtttgtgaacagaagttaaggccaaatatcccaaacagatggcagagctgtgaagccttgagagtaatggctaaaattatgagagaatgttggtatgccaatggagcagctaggcttacagcattgcggattaagaaaacattatcgcaactcagtcaacaggaaggcatcaaaatgtaattctacagctttgcctgaactctccttttttcttcagatctgctcctgggttttaatttgggaggtcaattgttctacctcactgagagggaacagaaggatattgcttccttttgcagcagtgtaataaagtcaattaaaaacttcccaggatttctttggacccaggaaacagccatgtgggtcctttctgtgcactatgaacgcttctttcccaggacagaaaatgtgtagtctacctttattttttattaacaaaacttgttttttaaaaagatgattgctggtcttaactttaggtaactctgctgtgctggagatcatctttaagggcaaaggagttggattgctgaattacaatgaaacatgtcttattactaaagaaagtgatttactcctggttagtacattctcagaggattctgaaccactagagtttccttgattcagactttgaatgtactgttctatagtttttcaggatcttaaaactaacacttataaaactcttatcttgagtctaaaaatgacctcatatagtagtgaggaacataattcatgcaattgtattttgtatactattattgttctttcacttattcagaacattacatgccttcaaaatgggattgtactataccagtaagtgccacttctgtgtctttctaatggaaatgagtagaattgctgaaagtctctatgttaaaacctatagtgtttgaattcaaaaagcttatttatctgggtaacccaaactttttctgttttgtttttggaagggtttttgtggtatgtcatttggtattctattctgaaaatgcctttctcctaccaaaatgtgcttaagccactaaagaaatgaagtggcattaattagtaaattattagcatggtcatgtttgaatattctcacatcaagcttttgcattttaattgtgttgtctaagtatacttttaaaaaatcaagtggcactctagatgcttatagtactttaatatttgtagcatacagactaatttttctaaaagggaaagtctgtctagctgcttgtgaaaagttatgtggtattctgtaagccatttttttctttatctgttcaaagacttattttttaagacatgaattacatttaaaattagaatatggttaatattaaataataggcctttttctaggaaggcgaaggtagttaataatttgaatagataacagatgtgcaagaaagtcacatttgttatgtatgtaggagtaaacgttcggtggatcctctgtctttgtaactgaggttagagctagtgtggttttgaggtctcactacactttgaggaaggcagcttttaattcagtgtttccttatgtgtgcgtacattgcaactgcttacatgtaatttatgtaatgcattcagtgcacccttgttacttgggagaggtggtagctaaagaacattctgagtataggtttttctccatttacagatgtctttggtcaaatattgaaagcaaacttgtcatggtcttcttacattaagttgaaactagcttataataactggtttttacttccaatgctatgaagtctctgcagggcttttacagttttcgaagtccttttatcactgtgatcttattctgaggggagaaaaaactatcatagctctgaggcaagacttcgactttatagtgctatcagttccccgatacagggtcagagtaacccatacagtattttggtcaggaagagaaagtggccatttacactgaatgagttgcattctgataatgtcttatctcttatacgtagaataaatttgaaagactatttgatcttaaaaccaaagtaattttagaatgagtgacatattacataggaatttagtgtcaatttcatgtgtttaaaaacatcatgggaaaaatgcttagaggttactattttgactacaaagttgagtttttttctgtagttaccataatttcattgaagcaaatgaatgagtttgagaggtttgtttttatagttgtgttgtattacttgtttaataataatctctaattctgtgatcaggtactttttttgtgggggttttttttttgtttttttttttttgttgttgtttttgggccatttctaagcctaccagatctgctttatgaaatccaggggaccaatgcattttatcactaaaactatttttatataattttaagaatataccaaaagttgtctgatttaaagttgtaatacatgatttctcactttcatgtaaggttatccacttttgctgaagatattttttattgaatcaaagattgagttacaattatacttttcttacctaagtggataaaatgtacttttgatgaatcagggaatttttttaaagttggagtttagttctaaattgactttacgtattactgcagttaattccttttttggctagggatggtttgataaaccacaattggctgatattgaaaatgaaagaaacttaaaaggtgggatggatcatgattactgtcgataactgcagataaatttgattagagtaataattttgtcatttaaaaacacagttgtttatactgcccatcctaggatgctcaccttccaagattcaacgtggctaaaacatcttctggtaaattgtgcgtccatattcattttgtcagtagccaggagaaatggggatgggggaaatacgacttagtgaggcatagacatccctggtccatcctttctgtctccagctgtttcttggaacctgctctcctgcttgctggtccctgacgcagagaccgttgcctcccccacagccgtttgactgaaggctgctctggagacctagagtaaaacggctgatggaagttgtgggacccacttccatttccttcagtcattagaggtggaagggaggggtctccaagtttggagattgagcagatgaggcttgggatgcccctgctttgacttcagccatggatgaggagtgggatggcagcaaggtggctcctgtggcagtggagttgtgccagaaacagtggccagttgtatcgcctataagacagggtaaggtctgaagagctgagcctgtaattctgctgtaataatgatagtgctcaagaagtgccttgagttggtgtacagtgccatggccatcaagaatcccagatttcaggttttattacaaaatgtaagtggtcacttggcgattttgtagtacatgcatgagttaccttttttctctatgtctgagaactgtcagattaaaacaagatggcaaagagatcgttagagtgcacaacaaaatcactatcccattagacacatcatcaaaagcttatttttattcttgcactggaagaatcgtaagtcaactgtttcttgaccatggcagtgttctggctccaaatggtagtgattccaaataatggttctgttaacactttggcagaaaatgccagctcagatattttgagatactaaggattatctttggacatgtactgcagcttcttgtctctgttttggattactggaatacccatgggccctctcaagagtgctggacttctaggacattaagatgattgtcagtacattaaacttttcaatcccattatgcaatcttgtttgtaaatgtaaacttctaaaaatatggttaataacattcaacctgtttattacaacttaaaaggaacttcagtgaatttgtttttattttttaacaagatttgtgaactgaatatcatgaaccatgttttgatacccctttttcacgttgtgccaacggaatagggtgtttgatatttcttcatatgttaaggagatgcttcaaaatgtcaattgctttaaacttaaattacctctcaagagaccaaggtacatttacctcattgtgtatataatgtttaatatttgtcagagcattctccaggtttgcagttttatttctataaagtatgggtattatgttgctcagttactcaaatggtactgtattgtttatatttgtaccccaaataacatcgtctgtactttctgttttctgtattgtatttgtgcaggattctttaggctttatcagtgtaatctctgccttttaagatatgtacagaaaatgtccatataaatttccattgaagtcgaatgatactgagaagcctgtaaagaggagaaaaaaacataagctgtgtttccccataagtttttttaaattgtatattgtatttgtagtaatattccaaaagaatgtaaataggaaatagaagagtgatgcttatgttaagtcctaacactacagtagaagaatggaagcagtgcaaataaattacatttttcccaagtgccagtggcatattttaaaataaagtgtatacgttggaatgagtcatgccatatgtagttgctgtagatggcaactagaacctttgagttacaagagtctttagaagttttctaaccctgcctagtgcaagttacaatattatagcgtgttcggggagtgccctcctgtctgcaggtgtgtctctgtgcctgggggcttttctccacatgcttaggggtgtgggtcttccattggggcatgatggacctgtctacaggtgatctctgttgcctttgggtcagcacatttgttagtctcctgggggtgaaaacttggcttacaagagaactggaaaaatgatgagatgtggtccccaaacccttgattgactctggggaggggctttgtgaataggattgctctcacattaaagatagttacttcaatttgaaggctggatttagggatttttttttttccttataacaaagacatcaccaggatatgaagcttttgttgaaagttggaaaaaaagtgaaattaaagacattcccagacaaa

SEQ ID NO: 106 - DNA, 268 bp, Homo sapiens
  misc_feature (66)..(66): n is a, c, g, or t
  misc_feature (105)..(105): n is a, c, g, or t
  misc_feature (218)..(218): n is a, c, g, or t
  misc_feature (261)..(261): n is a, c, g, or t
tcggtttttaaaaatctttttattgatatctcgttttcttcatgcatcacttctaatattcttttnttgtctatgttctgttttttttcattaagcacttttttntaattacattttaatgtaattagaatgccacctttacaatacacaaatacagtaacggtaactcgcactaaaacaaagcatacttctgatagccattatttttttctttgggncaaatttaaagttttttttttgtcacaaaaacaggaatgtacncatacaa

SEQ ID NO: 107 - DNA, 1753 bp, Homo sapiens
atgagggcactgctggcgctttgccttctccttggctggctgcgctggggcccggcgggcgcccagcagtccggagagtactgccacggctgggtggacgtgcagggcaactaccacgagggcttccagtgcccagaggacttcgacacgctggacgctaccatctgctgcggctcctgcgcgctccgctactgttgcgccgcggccgacgccaggctggagcagggcggctgcaccaacgaccgccgcgaactggagcacccaggcatcactgcgcagcctgtctacgtcccctttctcatcgtcggctccatcttcattgcgttcatcatcctgggctctgtagtggctatttattgttgcacctgtttgagacccaaggagccctcgcagcagccaatccgcttctcactccgcagctatcagacagagaccctgcccatgatcctgacctccaccagccccagggcaccctcccggcagtccagcacagccacgagctccagctccacaggcggctccatccgcaggttctcctttgccagggctgagccgggctgcctggtgccctcaccgcccccgccatacaccaccagccactcaatccacctggctcagccatctggtttcctggtgtcaccccagtatttcgcttaccccctccagcaggagcccccactgcctgggaagagctgtccagacttcagttccagttgacacgcccaggccatgaatccacaactcagtcagatggcagacaggtggagccctgctcccattgccacatgcaattctgagaaaatttcccttgtaactgatcagtgtcatggaggagcatgctaggaaaacacagcaccttctaatttgaaagttcctgtctccaatcacagaaaggctaaaccagagaactgttttctggttttgcaaacatgtgatcattacatttcaatctatgctacttttattcaaaatatgcagcagtttgactttaaagttgcaaactggctaaaaacgttttactggacattcagctatattgcttagaaaagggctacatgtttctttttcatataagttgttcattgagttatgataggaatatattcataaataagcaaagaaaaatacctaattgtaattatcaaaggttcacttaaaaaattaactattaggtaaacttaagggggcagtgaaaaatctatttatgatttcgggagtaacctaaccatgaataatattagcataatgagaacatttactttttaaataaataactaaattttgtttacaatatgagtttttccagaatacaaggtttcaataatcacatgaggagtttaaagttttaaatatatactcagacattcattgtaacacagagtgtatgtaaaatcatttcccccactcactggagggagtatttattgcagactttttgttcagcaacatttagtgtttcagtgaaagttggacagttggggcttaaaacatttatttgtaaaatgagctatgttcaaatgtaaatatttgtaatttaatgtatttaccacattgactgtactaattatttagtagtcatactgtaatttttatgttaataataactggagttcaaagtctagctattggtataatcatctaatattatatatatctccagtgcccctgaattttatgtttgatgactatatatttgggcatatatcttgttggattagaataaataaaacactttatattttcatgaactcta

SEQ ID NO: 108 - DNA, 1240 bp, Homo sapiens; identical to SEQ ID NO: 4

SEQ ID NO: 109 - DNA, 1957 bp, Homo sapiens
cccggggccgcggagccgggccggggcagcgccgtctccgcctcggggccgccgggggcgccctgctgagcgctacccacgtgcgtccgcgccacctcgcgggcgaccccgcggccaaggcccccggcggagcggctcccgggcgccccgaactagcccccaactttgggcgaagtttgcctgcgcctctccccgcccccacgcggcgcgccggggccgcggacggcagcggcccccggggatgcgccttcccggggtacccctggcgcgccctgcgctgctgctgctgctgccgctgctcgcgccgctgctgggaacgggtgcgccggccgagctgcgggtccgcgtgcggctgccggacggccaggtgaccgaggagagcctgcaggcggacagcgacgcggacagcatcagcctcgagctgcgcaagcccgacggcaccctcgtctccttcaccgccgacttcaagaaggatgtgaaggtcttccgggccctgatcctgggggagctggagaaggggcagagtcagttccaggccctctgctttgtcacccagctgcagcacaatgagatcatccccagtgaggccatggccaagctccggcagaaaaatccccgggcagtgcggcaggcggaggaggttcggggtctggagcatctgcacatggatgtcgctgtcaacttcagccagggggccctgctgagcccccatctccacaacgtgtgtgccgaggccgtggatgccatctacacccgccaggaggatgtccggttctggctggagcaaggtgtggacagttctgtgttcgaggctctgcccaaggcctcagagcaggcggagctgcctcgctgcaggcaggtgggggaccacgggaagccctgcgtctgccgctatggcctgagcctggcctggtacccctgcatgctcaagtactgccacagccgcgaccggcccacgccctacaagtgtggcatccgcagctgccagaagagctacagcttcgacttctacgtgccccagaggcagctgtgtctctgggatgaggatccctacccaggctagggtgggagcaacctggcgggtggctgctctgggcccactgctcttcaccagccactagagggggtggcaacccccacctgaggccttatttccctccctccccactcccctggccctagagcctgggcccctctggccccatctcacatgactgtgaagggggtgtggcatggcagggggtctcatgaaggcacccccattcccaccctgtgccttccttgcgggcagagagggagagaagggctccccagatctacacccctccctcctgcatctcccctggagtgttcacttgcaagctgccaaaacatgatggcctctggttgttctgttgaactccttgaacgtttagaccctaaaaggagtctatacctggacacccacctccccagacacaactcccttccccatgcacacatctggaaggagctggcccctcagtcccttcctactccccaacaaggggctcactatccccaaagaaggagctgttggggacccacgacgcagcccctgtactggattacagcatattctcatctctggccccgaggctgcctgtggggcgagtggagacctcccatcactgagacagatcacagaccacgagtgcctttcccggacctggacgttgcctccagagcaggcaccagctctttccctctctacacagaaatatttttgtaaggttctggggcagggagggagcatgaagtacgaggaaaacttgaattccagatttttagtgcaaagtatttatcatttctaccagaaataaacgttttaagtttttacttgaaaaaaaaaaaaaaaaaaaaaaaaaaaaaaaaaaaaaaaaaaaaaaaaaaaaaaaaaaaaaaaaaaaaaaaaaaaaaaaaaaaaaaaaaaaaaaaa

SEQ ID NO: 110 - DNA, 4179 bp, Homo sapiens
ggcggaggcggtgagcgcgggcggcgcggacggcagcggttggcgggcgggtcctccgctgttgcggccgctgcggcctccttgcccgggcttggggcgccgcgctggggaaagccgggggcccggacacattggcgtgagacctgggagtacgttgtgccaaatcattgccacttgccacatgagtgtaaatgatggcggatgccaagtatgtcctctgccgatgggaaaagcgattatggcctgcgaaggttttggcccgaaccgcgacttcaacaaaaaataagagaagaaaggaatattttctagctgtgcaaatcctctctctagaggaaaaaattaaggtgaaaagcactgaagttgagatcctagagaagtctcaaattgaagccattgcttcctcgttagcctcacagaatgaggttcctgcggcacccctggaagaactggcctacagacggtcgcttcgcgtggctctggacgttctgagcgagggctcgatttggagtcaagaaagctctgcagggacaggtagagctgaccggtctctgcgagggaagcccatggagcatgtctcctcgccctgtgattcgaactcctcatctcttccccgcggagacgtgttgggcagttccagacctcacaggaggaggccatgtgtgcaacaaagcctgtcaagttcgttcacttgtgaaaaggaccccgagtgcaaagtggaccacaagaaggggctcaggaaaagtgaaaacccaagaggcccgttggtcctcccagctggaggtggtgcccaagatgagagtgggtccagaatccaccacaaaaattggactcttgcaagtaagaggggaggaaactcagcgcagaaggctagcttgtgcctgaatggatcttccctttcagaggacgacacggagagagacatggggagcaaaggaggcagctgggcagccccgtccttgccctccggggtcagggaggacgatccctgtgccaacgctgagggacacgaccccggtctgccgttgggcagcctcactgcgcccccagcccctgagccctcggcctgctcagagcctggagaatgccctgcgaaaaagaggccgcgcctggatggcagccaaaggccgcctgccgtgcagctggagcccatggcagcaggggccgcaccatcccccgggccggggccagggcccagagagtctgtgaccccgcgcagcaccgccaggctgggcccgcctccctcccacgcctctgcggatgcaaccagatgtcttccttgcccggattcccagaagctggagaaagagtgccagtcttccgaagagtccatggggtctaattccatgcgttctatcctggaggaagacgaggaagacgaggagccaccaagagtccttttataccacgaaccacgttcgtttgaagtaggaatgctagtctggcataaacataaaaaataccccttctggccagcagtggtcaaaagcgtcaggcagagagataagaaagcaagtgtgctatacatcgaaggacacatgaacccgaaaatgaaaggtttcacagtgtctcttaaaagtttaaagcactttgattgtaaagagaaacagacgcttctgaatcaagccagggaggacttcaaccaggacatcggctggtgtgtctccctcatcaccgactacagggtccggttaggctgcgggtcttttgctggctctttcctggaatattacgcggctgatataagctatcctgtccgaaaatccatccagcaggacgtcttggggaccaagcttcctcaactgagcaaggggagccccgaggagcccgtggtggggtgccccctggggcagaggcagccctgccggaaaatgctccccgaccgctcgcgggccgcccgggaccgggccaaccagaagctggtggagtacattgtgaaggccaagggcgcggagagccacctgcgggccatcctaaagagcaggaagccatctcgctggctgcagaccttcctgagctccagccagtacgtgacctgtgtggagacctacctggaggatgaggggcagctggacctggtggtgaagtacctgcagggcgtctaccaggaggtgggggccaaggtgctccagcgcaccaacggcgaccggatccggttcattctggacgtgcttctgcccgaggccatcatctgtgcgatctctgcggtggacgaggtggactacaagacggctgaggagaagtacatcaaggggccttcgctgagctaccgggaaaaagaaatatttgacaaccagctccttgaagagcggaaccggcgccgtcggtgagggagcagccggctgtgctgtcagcggggcctggcggtggaagcgcctccagtgtgcatgagcgtgtctgaagatggggggctcagggggcacgtttgcgtttggacctgtctgtgcgttctcctgcgtggcagtcctgatttccatgcttctggagaatccatttcgttaacactgaaagccagttctcttttcctggcagtttttttcattttatttttggcattttttacaagataccgttcgggaaaggcttttgaaaggacggaagcgtattcactgtgcgccagtactcctggctgtgctgtggtttctcccgacgtgcacatcgatctcgtatgtgtggcatctgatattaaacgggaggttttaagaagcgtctgccgtgatcatggagcttcggaagcgggaatggttcttccgggtttgctgttttgtctgtttcccccttgtgtggtttccgcctgcgacagttccagaatttgctctcccactcagtgtgctctgcagctgtgaggaaacagccttcgttagaggcgggagcagagacgagccgctgctctgtgtcgtgtttgctgtggccgcagggagaggagcaggacacgcacctttccaggggcctctgtgtcccgcactgtgtgtgagtggaccgcagcgcgcagccacatgccctggctgccatgggccagaccgcctccacctcccccgcccgcctggcctgtcctgagtgcatttccctgcactgtgtcgtcactgcacagccagtcaccgcggtctcagtcatcggcgcggatggctatgctggggtcccagggtggccgcagcagtcagggtcactgtgggagccctggggtggagtgacaaaccgcattgtcctgtgcccgccatggcagaagcgcagcctttgtatggaggcccaaccgcgctcccgtctggagaagcggcttccggggtgtggctgccgggtcggctctggtccacagcacggtgccggggctgcaggttgttgagggctgtgactccgtggggctcagccaggctccagcagggtcagacgtgctgttaagagcaaagccacagacgatgacttgtccattctcagtggatgctccaggctgtgcctacacagcagtgctggtgacatgtccagggttccagggcccggtggcctgggagctgctttctccccactggctgggctgcatctggccctggctggaggccttgctttgaggggctgtgaccctcttcccccaggccctccccagccgacgacagccaccggagaggagatcggaacacgattgtctcagatgcagggcgctgtgcgggacgaagccgcaaggactctcgtatcgggcccttgggactcgggaggtgccagaggcggcggctgctctggacctcggtgttcactgacctttgtttcacttgcctctgctcgactccgagagcaggaaacccggccgtggcctggcagctccgcctcccatgcccgcacgctggggtctgtcttgtctggagcagtggggcacaccccggaggaggcgggggtcagggctgtcggccttggccccctgctggtcgctgtttcggggactcggggcggccagtaccaccgcctgaggcggggctcagcagcgttgcatgtacgggcctcgtactgcctcatggaaaatcctccggagccgccctccattgtgggttcctgagagtaggacacattgccatggttttgtgggaatcacgcgcccctgatggaacttttctgctgttgtgaagtacttttatccatttgcttctctgctgaccttgccaagttgttcgaggtggaattaaacacctcccagac

SEQ ID NO: 111 - DNA, 539 bp, Homo sapiens
caatcttgaaatatatccaggccgcggcagcctttccaaactcccgggcttcccacagaatgcgctcgaatgacactggaaagatttcaaaaatccaggcctccccctgttttaattcctttcttcccccaacagatgttgcaggcctggtgaggaagcccatcgtgtgtgactctcacgccactgacggggtttcgtggtgcggccaaattcctctatggccatccccagcatcagtccttccagattgaggaagccccttccaggaatgagctccatatttaaaggagtggaggagatgaacacctctccaccttggagccaagaggttaagctttcaggaggccccagggctgggcaggaaggattgaagctgtccctctgcccatccctcagagctgtttctctggactttaattgaaggtcgtgatcctcaaaccttcattttaatgactagttgcaacctcttctcttgttcagaccttgacccagcttctcaaccagccagagccactggtttggatttcatcttctatata

SEQ ID NO: 112 - DNA, 3022 bp, Homo sapiens
cggagtcagaaaggcgaggggcgccgggaactggcgtgtgggactccagacaggagaggctgcgccttccccgcaccgggaccttcgcgacacaccagatcctcgcccctggctcgcgcgaacgcacaggatgaccaccaccctcgtgtctgccaccatcttcgacttgagcgaagttttatgcaagggtaacaagatgctcaactatagtgctcccagtgcagggggttgcctgctggacagaaaggcagtgggcacccctgctggtgggggcttccctcggaggcactcagtcaccctgcccagctccaagttccaccagaaccagctcctcagcagcctcaagggtgagccagcccccgctctgagctcgcgagacagccgcttccgagaccgctccttctcggaagggggcgagcggctgctgcccacccagaagcagcccgggggcggccaggtcaactccagccgctacaagacggagctgtgccgcccctttgaggaaaacggtgcctgtaagtacggggacaagtgccagttcgcacacggcatccacgagctccgcagcctgacccgccaccccaagtacaagacggagctgtgccgcaccttccacaccatcggcttttgcccctacgggccccgctgccacttcatccacaacgctgaagagcgccgtgccctggccggggcccgggacctctccgctgaccgtccccgcctccagcatagctttagctttgctgggtttcccagtgccgctgccaccgccgctgccaccgggctgctggacagccccacgtccatcaccccaccccctattctgagcgccgatgacctcctgggctcacctaccctgcccgatggcaccaataacccttttgccttctccagccaggagctggcaagcctctttgcccctagcatggggctgcccgggggtggctccccgaccaccttcctcttccggcccatgtccgagtcccctcacatgtttgactctccccccagccctcaggattctctctcggaccaggagggctacctgagcagctccagcagcagccacagtggctcagactccccgaccttggacaactcaagacgcctgcccatcttcagcagactttccatctcagatgactaagccagggtagggagggacctcctgcctactccagcccctaccctgcacccacatcccataccctcttctccctacccatcccattccccacaggccctacattaacaaggttaagctcaacccctttcccccagcacctcagaatgtgccctccctctccccctcataaccccacctaacataaggacaagtcaatttgtcagtagcttcttctggcttgaaaccccctccctggattttatagcccacttaccatgcataacagacaagtcccatattttgtcagtagatgcctttttttttccggcttaagccttaagtgccaaatcacaagagaaaaagcagtaacagtttacagaagcaacttagtgccttgtaatctaactttgtcactgtgactacattacctcttcagcgccagagggcacccgtgggcctcccggagcctctgcccatggcggggtggagacccggaaccagcagccccctccactggcgacacaactgcaccttccctcatttcagtctcccgcacacttattcctcctcccctcttcccggtggcacctctccacctgtacccgcccccccaccccccccacccctgccccttggaagagttgttgccagaccagggttttgggggaaacctgtcttgacattcaaaacctttttcttcccgatctgaacccctgttgactaatcttgcctgggtttgtgtaggtctgcaggaaggaaggctgaaaaagcggacgaagattttgacttaagtgggactttgtgatttaattttttcttttttttaagtggggaggaaggggaagctagatggactaggagagacttgattttggtgctaaagttccccagttcatatgtgacatctttttaaaaaaaataacaacaaaaaaaaaatgagagaaaagctaaaaaaaaaaaagtaaggggtgagcagttaatggtattcattccacatacaatatctgtgtaaaacgatttcctgtagaagtagctttaatggtttttgctctagaataccgtaggtctatccttagagcactcacgccatgctttcttccctgggttttaaacttcatataactttcagaaattggagagcaaaaattttgcttgtcactgcacatcaatataaaaaagcttatttaacttatcaaaacgtatttattgccaaactatgcttttttttgttaattttgttcatatttatcgggatgacaaatccatagaatatattcttttatgttaaattatgatcttcatattaatcttaaaattttgtgacgtgtctttttcctttttttccacagttttaatatattattcttcaacgacattttttgtaactttacacttttttggttattttattttaaaaaaatgaaaaattaatttaaaaaaatgcaaaaaactgttggattatttattttagaaattcccccctttgtgttggactgcaaattgagtttctttctctttaggcctttcacaactaggactgagaatgtatgtaaaagttctgtgacagtacagaaggaaaacaactttttatgtatagcttctaaaaggggaaaaaaaaaaaaagagaaaccctttgacttccacgtgcccatctcaagacattccactcacagatttgaggttctggattccaggtctggagttttccaatgttaatgtaaacagaactggcacacacacattaagatgaatgtaattattattcctcttgctggtcactaccgtcgctttctatttctctttctttgtgtgaatttatttaaaagaaaaaaaaactttttgtaacgactatttgcagtttaaaaatcaataaaccccgttttttcaagaaacatt

SEQ ID NO: 113 - DNA, 5313 bp, Homo sapiens
tcggcgctatagcaacggtagctagctgcagggccagtggcacgctaggccatgtctggtccaactgatgagactgcaggagacttgcctgtgaaagatacaggtctaaacctctttggaatgggagggttacaagaaacttcaacaacacggacaatgaagtctcgccaggcagtgtcacgtgtcagtcgtgaggaactggaagacagatttttgcgtttgcatgatgagaacattttacttaaacagcatgcccgcaagcaggaggataaaattaaaagaatggccaccaagttaatacggctagttaatgacaagaaaagatatgagcgggttggtggcggccccaagcggctgggacgagatgtggaaatggaagaaatgattgagcagctgcaagagaaagttcatgagcttgaaaaacaaaatgaaaccctcaaaaacagactgatttcagccaaacagcaacttcaaacccagggttacaggcaaactccatacaataatgtacaatctcgtattaacactgggcgtagaaaagcaaatgaaaatgctggtttacaggaatgccccaggaaaggtataaaattccaagatgcagatgtagcagaaactccacatcccatgtttacaaaatatggcaacagtttacttgaagaagccagaggagaaataagaaatttagaaaacgttattcagtcacaaagaggccagatagaggagttagagcacttggctgagatcctgaaaactcagttgaggagaaaagaaaatgaaattgagttatctcttcttcagcttcgagaacagcaagctacagatcaaaggtcaaatattcgggacaatgtagaaatgattaagcttcataaacagctagtagagaaaagcaatgctctttcagcaatggaaggaaaatttattcagcttcaagagaagcaaagaactctcagaatcagccacgatgctttgatggcaaatggggatgaattaaacatgcaacttaaagagcagcgtttaaaatgctgcagtcttgagaaacaattacattctatgaagttttctgaaagaagaatagaagagctgcaggatagaattaatgatttagaaaaggaacgggaacttttaaaggaaaactatgataaactttatgacagtgccttcagtgctgcccatgaagagcaatggaagttaaaggagcaacagctgaaagtgcagattgctcagctcgagactgccttgaagtctgacttaacagacaaaactgaaatccttgacagattaaaaactgaaagagatcaaaatgaaaaactcgttcaagagaatagagaactacagttacagtatctggaacaaaagcaacaacttgatgaacttaaaaaacgcataaaattgtacaaccaggagaatgatattaatgctgatgaattgagtgaagctctcctacttataaaggctcaaaaagaacaaaaaaatggagacctttcctttttagtgaaagtagatagtgaaattaataaagatctagaacgctctatgagagagctgcaagcaactcatgcagaaacggtgcaagagctggaaaagacaagaaacatgctaattatgcaacacaaaattaataaagattatcagatggaggttgaggcagtgacccgtaagatggaaaatttgcagcaagattatgaactcaaagtggaacagtatgttcatcttcttgatatcagggctgcacgtatccataaactagaagcccaattaaaggatattgcctatgacaccaagcagtacaaatttaaaccagaaatcatgccagatgactctgttgatgaatttggtgaaaccatccacttagaacgaggcgaaaatctatttgaaatccatatcaacaaagtaaccttttcttctgaagttttacaggcatctggagataaagagcctgtcactttctgtacctatgctttctatgattttgaactacagacaactcccgtagtgcgaggccttcatcccgaatataacttcacttctcaatatcttgttcatgttaatgacttatttttgcaatatattcagaagaatactatcacccttgaggtccaccaggcttatagcacagaatatgaaacaattgcagcatgtcaattaaaatttcacgaaattcttgaaaaaagcggccgaatattttgtacagcaagtttgattggaacaaaaggagacatcccaaattttggcacagtggaatactggttccgattaagagttcccatggatcaagcaattcgactttatcgagaaagggcaaaggctttggggtatataacatcaaattttaaggggccagagcatatgcagtcgttaagtcagcaagcacccaaaactgctcaactcagttctacagattccacagatggcaacttaaatgaacttcacattacaataagatgttgcaaccacctgcagtcccgagcaagccacctgcagccacacccatatgttgtgtacaagttttttgattttgcagaccatgatacagctatcattcccagtagcaatgatccacagtttgatgatcatatgtatttcccagtgccaatgaatatggacttggatcgataccttaagtcagagtctctgagtttttatgtttttgatgatagtgatacccaggagaatatttacataggaaaagtcaatgtgcctctgatttcgttggcacatgacaggtgtatctcaggaatatttgagttaacagaccatcaaaagcatcctgctggcaccatccatgttatattgaaatggaaatttgcttaccttccaccaagtggatcaataacaactgaagacttaggaaatttcattcgcagcgaagagccagaagttgttcaaagacttcctccagcatcctctgttagcacactagttttagcaccaagacctaaaccaagacaacgtttaacacctgtagataagaaggtatctttcgtggatatcatgccacatcagagtgatgagacttctcctcctcttgaagataggaaggaaatttcaccagaggtagagcatataccagaaatagaaattaatatgctgactgttccacatgttcccaaggtttcacaagaaggcagtgtagatgaggtaaaagagaatactgagaaaatgcagcaaggaaaagatgatgtgtctttactatctgaaggtcagcttgcagaacaaagcttggcatcttctgaagatgaaacagaaataacagaggacttggaaccagaagttgaagaggacatgtcagcttctgacagtgatgactgtattattccaggtcctatctccaagaatatcaaacagagtctcgcattgtctcccgggctggggtgcagtagcgcgatctcagctcactgcaacttccgcctcccgggttccagcgattttcctgcctcagcctcccaagtagatgggattacaggtgcctgccaccacagccagccatcagaaaaaattcggattgagatcatagctctaagccttaatgattctcaagtaaccatggatgacactatccaacggctgtttgttgagtgtcgattctacagtcttcctgctgaagagacacccgtgtcacttccaaaacccaagagtgggcagtgggtctactataactatagcaatgtgatctacgtggataaagaaaacaacaaagcaaagagagacatcttaaaagctatactacaaaaacaagagatgcctaatagaagccttcgcttcaccgtggtcagtgaccctccagaggacgagcaggacctggagtgtgaggacattggcgtggctcacgtcgaccttgccgacatgtttcaggaagggagggacctcattgagcaaaatatcgatgtttttgatgcacgagcagatggtgaaggtattggcaagctcagggtaacagtcgaagctctccatgccctccagtctgtctacaagcaatacagagatgacttggaggcttgaaagcaaatgctccagaggcatctcctactcctcagtaaatgctcacatgaaagtacctacatgagatttttgtaattactctggtgtatataatctataattcatgggaagctgggagcggggagacctgggtttgaagtgttgaagttttgtatactttttcatttgtttatttctctattccctccttctcataactgccacccctcaggacttaagttctccataatgggcagtaccttctcaataatttatacctacgtgatagcgtgagaaagtctatttgcattttcaacattttcttaggaagaaccgaaatgcaattcccatttttatttttaataagcaaaagcataaatcttagaaaacctatgaaaaagaaatacttttatgttatccctaatcgtcccactaaatggaatgcctatgattagcttcattaagagttttatactgtgaagattttattagaagcaatatatgaaaattacttggattaatgtgttaatcttcctctttaaaatgctaatatccattttatgcacattaaagctcagtatgcattttctttgatgcatgcagtttctatcaattaaatataaagaatgaaacttagcaccaacttattcaatgactgcaagttttttgtctttctttcttaaaagttcattctatttgtattattttcatacatttgtaatggtgacccagggatgtatatataaaaaggagataggtatatagatagatgtgaaatttacacgttgaaaacttagtatatgacacagaaagaaattatgaaaagtataactcaaattctgatatgcttagttagacgtgaaaggagtatctttttatcattttttaaatttacatcaagccagtacagtgccagggtgtatctgggtaaccagatcctcgaaaagcagctctgaaagttaattttctagcttttacccaatctcactgaaggatttaattgatatttttaatggagctgtgaatcaatgctgcaaaggaattgtctctagaggtctaggataatgcatttcattttttaatttacttttttatttgtcattttcttcaaaggatttttataggctgtgggttttcactgtttgcaaacaggctatgttccttcttaagcacatgtaaagtattcagggagataagtaatttattaaaatctacctaatttgccgtgatatattagatctctgcttcagtgatcacagaccatttcatttagagaattaggcattccctctttgtgtgattaaagctctggaaaataaaaaaaaaaaaaaaaaa

SEQ ID NO: 114 - DNA, 504 bp, Homo sapiens
ttttttagaacagtggatctctcttccactttaggaaaatgttatctgtctagaaaaatggccatttttggtagcaaaacttaaatgtgtaactgtgaaaaatgcacgtttaaattagtagaaaaaaaaataacaatgcaattctccttggctagaatgtttttgttcctccttgaaattttaaatcaacacaacgtagcaaccctccctgcccacctcagaaaaggtcacactgtatgcactgtatgaaccttgtcaaaattctacgtattattcaaaaaagttttcatgccaggatattctccaaattcttttttcatttttttttctggagagtgctctattctaggatttaattacacttcaaacgtaattgaaatttacctaccctgcttgtccaaacaatcaagagccacttccataaaatctaaactactttagatataaaccatttttaccaaaagtcacatcatagtcacaactgcaaactggcattgctatgca

SEQ ID NO: 115 - DNA, 1296 bp, Homo sapiens
  misc_feature (71)..(72): n is a, c, g, or t
  misc_feature (75)..(75): n is a, c, g, or t
  misc_feature (77)..(77): n is a, c, g, or t
gcagggttcgactctagaggatccccctggggcccttactctagcgggtactcactctgtcgtgcgagaanncanancttattttccaggtggcagtgctccttttggacttttctctaggtttggcgctaaactcttcttgtgagctcactccaccccttcttcctccctttaacttatccattcacttaaaacattagctggtcatctggtaagcccgggacagtaagccgagtggctgttggagtcggtattgttggtaatggtggaggaagagaggccttcccgctgaggctggggtggggcggatcggtgttgcttgcctgcagagagggtggggagtgaatgtgcacccttgggtgggcctgcagccatccagctgaaagttacaaaaatgcttcatggaccgtggtttgttactatagtgttcctcatggcgagcagatggaaccgggagacatggagtccctggccagtgtgagtcctagcattgcaggaggggagaccctggaggagagagcccgcctcaattgatgcctgcagattgaatttccagaggcttaggaggaggaagttctccaatgttctgttttccaggccttgcttcaggaagccctgtattcaggaggctaccatttaaagtttgcagatgagcttatggggggcaaaccttaaaaagtcccacagcagatgcatccggcctcgaggggcccatcagctttgaaataaatgcttgttccagagccccatgaaatgccagcaggcacccctcctttcctcggggtaaaggttttcagatgctgcatcttcctaaaattgagcctccggtcatactagttttgtgcttgggaaccttgcttcaagaagatccctaagctgtagaacattttaacgttgatgccacaacgcagattgatgccttgtagatggagcttgcagatggagccccgtgacctctcacctacccacctgtttgcctgccttcttgtgcgtttctcggagaagttcttagcctgatgaaataacttggggcgttgaagagctgtttaattttaaatgccttagactggggatatattagaggaagcagattgtcaaattaagggtgtcattgtgttgtgctaaacgctgggagggtacaagttggtcattcctaaatctgtgtgtgagaaatggcaggtctagcttgggcattgtgattgcattgcagattactaggagaagggaatggtgggtacaccggtagtgctcttttgttcttgcttcgtttttttaaacttgaactttacaacgtta

SEQ ID NO: 116 - DNA, 20 bp, Artificial Sequence
  Synthetic primer
agcccaacatcaaagacacc

SEQ ID NO: 117 - DNA, 20 bp, Artificial Sequence
  Synthetic primer
gctcagctctgggatgatgt

SEQ ID NO: 118 - DNA, 20 bp, Artificial Sequence
  Synthetic primer
agcatcttcggttggtgttc

SEQ ID NO: 119 - DNA, 20 bp, Artificial Sequence
  Synthetic primer
ctacggccagcattagcttc

SEQ ID NO: 120 - DNA, 20 bp, Artificial Sequence
  Synthetic primer
atggccgcacaatagaactc

SEQ ID NO: 121 - DNA, 20 bp, Artificial Sequence
  Synthetic primer
tgtcccgtagcaccttctgt

SEQ ID NO: 122 - DNA, 20 bp, Artificial Sequence
  Synthetic primer
tggatcgaatccaaacacaa

SEQ ID NO: 123 - DNA, 20 bp, Artificial Sequence
  Synthetic primer
ctggcttgtctgcaaacctt

SEQ ID NO: 124 - DNA, 20 bp, Artificial Sequence
  Synthetic primer
cccgacataccttcggacta

SEQ ID NO: 125 - DNA, 20 bp, Artificial Sequence
  Synthetic primer
ctgtgaagccaagatgcaga

SEQ ID NO: 126 - DNA, 19 bp, Artificial Sequence
  Synthetic primer
gacggcagagaggatcaca

SEQ ID NO: 127 - DNA, 20 bp, Artificial Sequence
  Synthetic primer
catcaaaagccacgtcttca

SEQ ID NO: 128 - DNA, 20 bp, Artificial Sequence
  Synthetic primer
ctgcaacgacatgggtaaga

SEQ ID NO: 129 - DNA, 20 bp, Artificial Sequence
  Synthetic primer
ctgggcttcgtaggacttga

SEQ ID NO: 130 - DNA, 20 bp, Artificial Sequence
  Synthetic primer
gatcatccctgtacgctgct

SEQ ID NO: 131 - DNA, 20 bp, Artificial Sequence
  Synthetic primer
agcagcttctcgatcaggtc

SEQ ID NO: 132 - DNA, 20 bp, Artificial Sequence
  Synthetic primer
tgctggggataggaattctg

SEQ ID NO: 133 - DNA, 20 bp, Artificial Sequence
  Synthetic primer
cattgcgacactccatcact

SEQ ID NO: 134 - DNA, 20 bp, Artificial Sequence
  Synthetic primer
tcagcaagatctgcgtgaac

SEQ ID NO: 135 - DNA, 20 bp, Artificial Sequence
  Synthetic primer
ggggcaggtccttctctatc

SEQ ID NO: 136 - DNA, 20 bp, Artificial Sequence
  Synthetic primer
ccggactacatgaacctgct

SEQ ID NO: 137 - DNA, 20 bp, Artificial Sequence
  Synthetic primer
gcagagatggacagcatgaa

SEQ ID NO: 138 - DNA, 20 bp, Artificial Sequence
  Synthetic primer
cctccgaatggtacctgaaa

SEQ ID NO: 139 - DNA, 20 bp, Artificial Sequence
  Synthetic primer
ttcatagttggccaccacaa

SEQ ID NO: 140 - DNA, 20 bp, Artificial Sequence
  Synthetic primer
agtgactcggcaggagaaga

SEQ ID NO: 141 - DNA, 20 bp, Artificial Sequence
  Synthetic primer
cttggagctcatgggtgact

SEQ ID NO: 142 - DNA, 20 bp, Artificial Sequence
  Synthetic primer
cgagctgcactcctacctct

SEQ ID NO: 143 - DNA, 20 bp, Artificial Sequence
  Synthetic primer
gccatgtacttgtcgtgctt

SEQ ID NO: 144 - DNA, 20 bp, Artificial Sequence
  Synthetic primer
gggcgagggaatagtcagag

SEQ ID NO: 145 - DNA, 20 bp, Artificial Sequence
  Synthetic primer
aatcctcgtcttgtcgttgg

SEQ ID NO: 146 - DNA, 20 bp, Artificial
  Synthetic primer
ttccttttggccaccttatg

SEQ ID NO: 147 - DNA, 21 bp, Artificial Sequence
  Synthetic primer
cctgtggttccaatatccttg

SEQ ID NO: 148 - DNA, 18 bp, Artificial Sequence
  Synthetic primer
ctgccagggtttgtggag

SEQ ID NO: 149 - DNA, 18 bp, Artificial Sequence
  Synthetic primer
gagccgaaccttgccttc

SEQ ID NO: 150 - DNA, 20 bp, Artificial Sequence
  Synthetic primer
gtcattttaggaacattatg

SEQ ID NO: 151 - DNA, 20 bp, Artificial Sequence
  Synthetic primer
gagaacaccaatgcaatctt

SEQ ID NO: 152 - DNA, 20 bp, Artificial Sequence
  Synthetic primer
ccgtcatctgggtgactttt

SEQ ID NO: 153 - DNA, 20 bp, Artificial Sequence
  Synthetic primer
aacaaccggacgtcatctgt

SEQ ID NO: 154 - DNA, 18 bp, Artificial Sequence
  Synthetic primer
ccagctggtggtgctgtt

SEQ ID NO: 155 - DNA, 19 bp, Artificial Sequence
  Synthetic primer
cttggtgcctggaaggatg

SEQ ID NO: 156 - DNA, 20 bp, Artificial Sequence
  Synthetic primer
aacccttgggatggaaaatc

SEQ ID NO: 157 - DNA, 20 bp, Artificial Sequence
  Synthetic primer
tggtcaggtgcgtgtaggta

SEQ ID NO: 158 - DNA, 19 bp, Artificial Sequence
  Synthetic primer
gggcccatcgactacaaac

SEQ ID NO: 159 - DNA, 20 bp, Artificial Sequence
  Synthetic primer
gctcacggttccacttcatt

SEQ ID NO: 160 - DNA, 20 bp, Artificial Sequence
  Synthetic primer
gacgtgcagaaatggcacct

SEQ ID NO: 161 - DNA, 20 bp, Artificial Sequence
  Synthetic primer
cagtcacacggcagatggtt

SEQ ID NO: 162 - DNA, 20 bp, Artificial Sequence
  Synthetic primer
ggcctgtttgatgtggtcat

SEQ ID NO: 163 - DNA, 20 bp, Artificial Sequence
  Synthetic primer
cggtcctttgagctttcttg

SEQ ID NO: 164 - DNA, 20 bp, Artificial Sequence
  Synthetic primer
cagcaaattgccacagagaa

SEQ ID NO: 165 - DNA, 20 bp, Artificial Sequence
  Synthetic primer
ggaacaggagcacgactagg

SEQ ID NO: 166 - DNA, 18 bp, Artificial Sequence
  Synthetic primer
caaccacgagggatccag

SEQ ID NO: 167 - DNA, 20 bp, Artificial Sequence
  Synthetic primer
caagtctctgccccatccta

SEQ ID NO: 168 - DNA, 20 bp, Artificial Sequence
  Synthetic primer
tgcctcgaaccctcatactc

SEQ ID NO: 169 - DNA, 20 bp, Artificial Sequence
  Synthetic primer
tgtccacatactccgtccag

SEQ ID NO: 170 - DNA, 23 bp, Artificial Sequence
  Synthetic primer
tgcattaaaccagtgatgaagaa

SEQ ID NO: 171 - DNA, 20 bp, Artificial Sequence
  Synthetic primer
acagcgatacccactcttgc

SEQ ID NO: 172 - DNA, 20 bp, Artificial Sequence
  Synthetic primer
ggtgtcagagccagttgtca

SEQ ID NO: 173 - DNA, 20 bp, Artificial Sequence
  Synthetic primer
aaatttccacatcggcagtc

SEQ ID NO: 174 - DNA, 22 bp, Artificial Sequence
  Synthetic primer
caggttttgaaagcaagtttga

SEQ ID NO: 175 - DNA, 21 bp, Artificial Sequence
  Synthetic primer
ttgccagaaaaagaagcagag

SEQ ID NO: 176 - DNA, 21 bp, Artificial Sequence
  Synthetic primer
caatgtgaccttctgtgtgct

SEQ ID NO: 177 - DNA, 20 bp, Artificial Sequence
  Synthetic primer
cgcactatgtcgatgtcgtt

SEQ ID NO: 178 - DNA, 21 bp, Artificial Sequence
  Synthetic primer
aaaaccctgtgccttacacaa

SEQ ID NO: 179 - DNA, 21 bp, Artificial Sequence
  Synthetic primer
gaggctgtgtctcaatcacct

SEQ ID NO: 180 - DNA, 20 bp, Artificial Sequence
  Synthetic primer
atgccggtgacacaacagta

SEQ ID NO: 181 - DNA, 20 bp, Artificial Sequence
  Synthetic primer
gacgaacatcaattccagca

SEQ ID NO: 182 - DNA, 20 bp, Artificial Sequence
  Synthetic primer
cgttaagtttacggccaacg

SEQ ID NO: 183 - DNA, 20 bp, Artificial Sequence
  Synthetic primer
cgcaccttctccactagtcc

SEQ ID NO: 184 - DNA, 20 bp, Artificial Sequence
  Synthetic primer
tgggtatttgtggcaattca

SEQ ID NO: 185 - DNA, 20 bp, Artificial Sequence
  Synthetic primer
tggcatatgacccaactgac

SEQ ID NO: 186 - DNA, 20 bp, Artificial Sequence
  Synthetic primer
aatgcacgtgtgtgtgtgtg

SEQ ID NO: 187 - DNA, 20 bp, Artificial Sequence
  Synthetic primer
tcctctgtcccaacctcttg

SEQ ID NO: 188 - DNA, 20 bp, Artificial Sequence
  Synthetic primer
ttgcagtgatttgcttttgc

SEQ ID NO: 189 - DNA, 20 bp, Artificial Sequence
  Synthetic primer
gccacagcatctgggtattt

SEQ ID NO: 190 - DNA, 20 bp, Artificial Sequence
  Synthetic primer
gttcgagaagcaccgagaag

SEQ ID NO: 191 - DNA, 20 bp, Artificial Sequence
  Synthetic primer
ttaaagcctcccttggctct

SEQ ID NO: 192 - DNA, 20 bp, Artificial Sequence
  Synthetic primer
atcaaagggcaaatggaaca

SEQ ID NO: 193 - DNA, 21 bp, Artificial Sequence
  Synthetic primer
catgcacccttgtacactgaa

SEQ ID NO: 194 - DNA, 22 bp, Artificial Sequence
  Synthetic primer
tttgttttagtgcgagttaccg

SEQ ID NO: 195 - DNA, 26 bp, Artificial Sequence
  Synthetic primer
tctgtttttgttcattaagcactttt

SEQ ID NO: 196 - DNA, 22 bp, Artificial Sequence
  Synthetic primer
tgtaaaatcatttcccccactc

SEQ ID NO: 197 - DNA, 20 bp, Artificial Sequence
  Synthetic primer
ttaagccccaactgtccaac

SEQ ID NO: 198 - DNA, 20 bp, Artificial Sequence
  Synthetic primer
agcggtacaggtgagcagag

SEQ ID NO: 199 - DNA, 20 bp, Artificial Sequence
  Synthetic primer
gggctccttcctgttactga

SEQ ID NO: 200 - DNA, 20 bp, Artificial Sequence
  Synthetic primer
acacctgctgggctgtaaac

SEQ ID NO: 201 - DNA, 20 bp, Artificial Sequence
  Synthetic primer
gacagaaaaggttggctgga

SEQ ID NO: 202 - DNA, 20 bp, Artificial Sequence
  Synthetic primer
tccaaggtggagaggtgttc

SEQ ID NO: 203 - DNA, 20 bp, Artificial Sequence
  Synthetic primer
tgtgtgactctcacgccact

SEQ ID NO: 204 - DNA, 20 bp, Artificial Sequence
  Synthetic primer
gcctgtaagtacggggacaa

SEQ ID NO: 205 - DNA, 20 bp, Artificial Sequence
  Synthetic primer
ctcttcagcgttgtggatga

SEQ ID NO: 206 - DNA, 20 bp, Artificial Sequence
  Synthetic primer
cgtggatatcatgccacatc

SEQ ID NO: 207 - DNA, 20 bp, Artificial Sequence
  Synthetic primer
ttccttgctgcattttctca

SEQ ID NO: 208 - DNA, 22 bp, Artificial Sequence
  Synthetic primer
cagtgtgaccttttctgaggtg

SEQ ID NO: 209 - DNA, 21 bp, Artificial Sequence
  Synthetic primer
caatgcaattctccttggcta

SEQ ID NO: 210 - DNA, 20 bp, Artificial Sequence
  Synthetic primer
gggcatgaaatgaagacacc

SEQ ID NO: 211 - DNA, 20 bp, Artificial Sequence
  Synthetic primer
aggaagttcacagccacctg

SEQ ID NO: 212 - DNA, 18 bp, Artificial Sequence
  Synthetic primer
acagagcctcgcctttgc

SEQ ID NO: 213 - DNA, 18 bp, Artificial Sequence
  Synthetic primer
cacgatggaggggaagac

SEQ ID NO: 214 - DNA, 20 bp, Artificial Sequence
  Synthetic primer
ccgaatcagtacctccctca

SEQ ID NO: 215 - DNA, 20 bp, Artificial Sequence
  Synthetic primer
gaatcccctggaggctaatg

SEQ ID NO: 216 - DNA, 20 bp, Artificial Sequence
  Synthetic primer
gcaggtaaacgtgctgctct

SEQ ID NO: 217 - DNA, 20 bp, Artificial Sequence
  Synthetic primer
ctccaactgaaggtccctga

SEQ ID NO: 218 - DNA, 20 bp, Artificial Sequence
  Synthetic primer
ggaagtcgaggacgagagtg

SEQ ID NO: 219 - DNA, 20 bp, Artificial Sequence
  Synthetic primer
acttgtcccgtcatttcctg

SEQ ID NO: 220 - DNA, 20 bp, Artificial Sequence
  Synthetic primer
tgagctccctggtgtctctc

SEQ ID NO: 221 - DNA, 20 bp, Artificial Sequence
  Synthetic primer
cacatcaggctcacgttgat

SEQ ID NO: 222 - DNA, 20 bp, Artificial Sequence
  Synthetic primer
gtgtacgagtcggccaagtt

SEQ ID NO: 223 - DNA, 20 bp, Artificial Sequence
  Synthetic primer
ggatgagcgtgaagtggatt

SEQ ID NO: 224 - DNA, 24 bp, Artificial Sequence
  Synthetic primer
tggatacagttctttttgcttttt

SEQ ID NO: 225 - DNA, 19 bp, Artificial Sequence
  Synthetic primer
gcacgtgcctgcaagttat

SEQ ID NO: 226 - DNA, 20 bp, Artificial Sequence
  Synthetic primer
gtggttggttgtggtgagtg

SEQ ID NO: 227 - DNA, 20 bp, Artificial Sequence
  Synthetic primer
cgtgggggctgatctaacta

SEQ ID NO: 228 - DNA, 21 bp, Artificial Sequence
  Synthetic primer
gggaagatttgaattccattg

SEQ ID NO: 229 - DNA, 20 bp, Artificial Sequence
  Synthetic primer
tttaaaatatgaccagatgg

SEQ ID NO: 230 - DNA, 20 bp, Artificial Sequence
  Synthetic primer
cagactgttgctggtcctga

SEQ ID NO: 231 - DNA, 20 bp, Artificial Sequence
  Synthetic primer
gccctgcaccttgagtaaaa

SEQ ID NO: 232 - DNA, 20 bp, Artificial Sequence
  Synthetic primer
gccttgaccgcaagatagag

SEQ ID NO: 233 - DNA, 20 bp, Artificial Sequence
  Synthetic primer
gccagctcctcgtagttcac

SEQ ID NO: 234 - DNA, 20 bp, Artificial Sequence
  Synthetic primer
aaacggctaccacatccaag

SEQ ID NO: 235 - DNA, 20 bp, Artificial Sequence
  Synthetic primer
cctccaatggatcctcgtta

SEQ ID NO: 236 - DNA, 20 bp, Artificial Sequence
  Synthetic primer
ggtcggagtcaacggatttg

SEQ ID NO: 237 - DNA, 20 bp, Artificial Sequence
  Synthetic primer
ggatctcgctcctggaagat

SEQ ID NO: 238 - DNA, 20 bp, Artificial Sequence
  Synthetic primer
ttcagagcgagtatggagca

SEQ ID NO: 239 - DNA, 20 bp, Artificial Sequence
  Synthetic primer
ctctcgtcggtgactgttca

SEQ ID NO: 240 - DNA, 20 bp, Artificial Sequence
  Synthetic primer
ccacagctcttccactcaca

SEQ ID NO: 241 - DNA, 20 bp, Artificial Sequence
  Synthetic primer
gcggtacaatcccagaactc

SEQ ID NO: 242 - DNA, 20 bp, Artificial Sequence
  Synthetic primer
gagcaatcaccttcgtggat

SEQ ID NO: 243 - DNA, 19 bp, Artificial Sequence
  Synthetic primer
ccagcagcataggaccgta

SEQ ID NO: 244 - DNA, 20 bp, Artificial Sequence
  Synthetic primer
tggcgtcgtgattagtgatg

SEQ ID NO: 245 - DNA, 20 bp, Artificial Sequence
  Synthetic primer
gcacacagagggctacaatg

SEQ ID NO: 246 - DNA, 20 bp, Artificial Sequence
  Synthetic primer
ggtttcatccatccgacatt

SEQ ID NO: 247 - DNA, 20 bp, Artificial Sequence
  Synthetic primer
acggcaggcatactcatctt

SEQ ID NO: 248 - DNA, 20 bp, Artificial Sequence
  Synthetic primer
cctggcatttcagagacagc

SEQ ID NO: 249 - DNA, 20 bp, Artificial Sequence
  Synthetic primer
acctgccccttgtagttggt

SEQ ID NO: 250 - DNA, 20 bp, Artificial Sequence
  Synthetic primer
ccaaggagacgaagctgaag

SEQ ID NO: 251 - DNA, 20 bp, Artificial Sequence
  Synthetic primer
tatttgtgggacagcatgga

SEQ ID NO: 252 - DNA, 20 bp, Artificial Sequence
  Synthetic primer
aacgtggctctgaaatggac

SEQ ID NO: 253 - DNA, 20 bp, Artificial Sequence
  Synthetic primer
tctgtgttcgtgggatggta

SEQ ID NO: 254 - DNA, 20 bp, Artificial Sequence
  Synthetic primer
ccgaggattaaactggctca

SEQ ID NO: 255 - DNA, 20 bp, Artificial Sequence
  Synthetic primer
gaggcccaggaatgtttcta

SEQ ID NO: 256 - DNA, 20 bp, Artificial Sequence
  Synthetic primer
gtctgactccctggtggtgt

SEQ ID NO: 257 - DNA, 20 bp, Artificial Sequence
  Synthetic primer
cggtctttgtccaccttcat
